United States Patent Application Publication US 2026/0286386 A1, published September 24, 2026 (application 19/472,847).

The application's sequence listing, which the Patent Office published only in electronic form, follows.

SEQUENCE LISTING (283 sequences)

SEQ ID NO: 1 - DNA, 1590 bp, synthetic construct
  source 1..1590: mol_type = other DNA
atggccagtcgggaagaggagcagcgcgaaaccacccccgagcgcggacgcggtgcggcgcgacgtcccccaaccatggaggacgtgtcgtccccgtccccgtcgccgccgcctccccgggcgcccccaaaaaagcggatgaggcggcgtatcgagtccgaggacgaggaagactcatcacaagacgcgctggtgccgcgcacacccagcccgcggccatcgacctcggcggcggatttggccattgcgcccaagaagaaaaagaagcgcccttctcccaagcccgagcgcccgccatcaccagaggtaatcgtggacagcgaggaagaaagagaagatgtggcgctacaaatggtgggtttcagcaacccaccggtgctaatcaagcatggcaaaggaggtaagcgcacagtgcggcggctgaatgaagacgacccagtggcgcgtggtatgcggacgcaagaggaagaggaagagcccagcgaagcggaaagtgaaattacggtgatgaacccgctgagtgtgccgatcgtgtctgcgtgggagaagggcatggaggctgcgcgcgcgctgatggacaagtaccacgtggataacgatctaaaggcgaacttcaaactactgcctgaccaagtggaagctctggcggccgtatgcaagacctggctgaacgaggagcaccgcgggttgcagctgaccttcaccagcaacaagacctttgtgacgatgatggggcgattcctgcaggcgtacctgcagtcgtttgcagaggtgacctacaagcatcacgagcccacgggctgcgcgttgtggctgcaccgctgcgctgagatcgaaggcgagcttaagtgtctacacggaagcattatgataaataaggagcacgtgattgaaatggatgtgacgagcgaaaacgggcagcgcgcgctgaaggagcagtctagcaaggccaagatcgtgaagaaccggtggggccgaaatgtggtgcagatctccaacaccgacgcaaggtgctgcgtgcacgacgcggcctgtccggccaatcagttttccggcaagtcttgcggcatgttcttctctgaaggcgcaaaggctcaggtggcttttaagcagatcaaggcttttatgcaggcgctgtatcctaacgcccagaccgggcacggtcaccttttgatgccactacggtgcgagtgcaactcaaagcctgggcacgcgccctttttgggaaggcagctaccaaagttgactccgttcgccctgagcaacgcggaggacctggacgcggatctgatctccgacaagagcgtgctggccagcgtgcaccacccggcgctgatagtgttccagtgctgcaaccctgtgtatcgcaactcgcgcgcgcagggcggaggccccaactgcgacttcaagatatcggcgcccgacctgctaaacgcgttggtgatggtgcgcagcctgtggagtgaaaacttcaccgagctgccgcggatggttgtgcctgagtttaagtggagcactaaacaccagtatcgcaacgtgtccctgccagtggcgcatagcgatgcgcggcagaacccctttgatttttaa

SEQ ID NO: 2 - DNA, 86 bp, synthetic construct
  source 1..86: mol_type = other DNA
tgacgtagttttcgcgcttaaatttgagaaagggcgcgaaactagtccttaagagtcagcgcgcagtatttactgaagagagcctc

SEQ ID NO: 3 - DNA, 4679 bp, synthetic construct
  source 1..4679: mol_type = other DNA
tgacgtagttttcgcgcttaaatttgagaaagggcgcgaaactagtccttaagagtcagcgcgcagtatttactgaagagagcctccgcgtcttccagcgtgcgccgaagctgatcttcgcttttgtgatacaggcagctgcgggtgagggatcgcagagacctgttttttattttcagctcttgttcttggcccctgctctgttgaaatatagcatacagagtgggaaaaatcctgtttctaagctcgcgggtcgatacgggttcgttgggcgccagacgcagcgctcctcctcctgctgctgccgccgctgtggatttcttgggctttgtcagagtcttgctatccggtcgcctttgcttctgtgtggccgctgctgttgctgccgctgccgccggtgcagtatgggctgtagagatgacggtagtaatgcaggatgttacgggggaaggccacgccgtgatggtagagaagaaagcggcgggcgaaggagatgttgcccccacagtcttgcaagcaagcaactatggcgttcttgtgcccgcgccatgagcggtagccttggcgctgttgttgctcttgggctaacggcggcggctgcttggacttaccggccctggttccagtggtgtcccatctacggttgggtcggcgaacgggcagtgccggcggcgcctgaggagcggaggttgtagccatgctggaaccggttgccgatttctggggcgccggcgaggggaatgcgaccgagggtgacggtgtttcgtctgacacctcttcgacctcggaagcttcctcgtctaggctctcccagtcttccatcatgtcctcctcctcctcgtccaaaacctcctctgcctgactgtcccagtattcctcctcgtccgtgggtggcggcggcagctgcagcttctttttgggtgccatcctgggaagcaagggcccgcggctgctgctgatagggctgcggcggcggggggattgggttgagctcctcgccggactgggggtccaagtaaaccccccgtccctttcgtagcagaaactcttggcgggctttgttgatggcttgcaattggccaagaatgtggccctgggtaatgacgcaggcggtaagctccgcattaggcgggcgggattggtcttcgtagaacctaatctcgtgggcgtggtagtcctcaggtacaaatttgcgaaggtaagccgacgtccacagccccggagtgagtttcaaccccggagccgcggacttttcgtcaggcgagggaccctgcagctcaaaggtaccgataatttgactttcgttaagcagctgcgaattgcaaaccagggagcggtgcggggtgcataggttgcagcgacagtgacactccagtagaccgtcaccgctcacgtcttccattatgtcagagtggtaggcaaggtagttggctagctgcagaaggtagcagtggccccaaagcggcggagggcattcgcggtacttaatgggcacaaagtcgctaggaagtgcacagcaggtggcgggcaagattcctgagcgctctaggataaagttcctaaagttctgcaacatgctttgactggtgaagtctggcagaccctgttgcagggttttaagcaggcgttcggggaaaatgatgtccgccaggtgcgcggccacggagcgctcgttgaaggccgtccataggtccttcaagttttgctttagcagtttctgcagctccttgaggttgcactcctccaagcactgctgccaaacgcccatggccgtctgccaggtgtagcatagaaataagtaaacgcagtcgcggacgtagtcgcggcgcgcctcgcccttgagcgtggaatgaagcacgttttgcccaaggcggttttcgtgcaaaattccaaggtaggagaccaggttgcagagctccacgttggagatcttgcaggcctggcgtacgtagccctgtcgaaaggtgtagtgcaatgtttcctctagcttgcgctgcatctccgggtcagcaaagaaccgctgcatgcactcaagctccacggtaacgagcactgcggccatcattagtttgcgtcgctcctccaagtcggcaggctcgcgcgtttgaagccagcgcgctagctgctcgtcgccaactgcgggtaggccctcctctgtttgttcttgcaaatttgcatccctctccaggggctgcgcacggcgcacgatcagctcactcatgactgtgctcatgaccttggggggtaggttaagtgccgggtaggcaaagtgggtgacctcgatgctgcgttttagtacggctaggcgcgcgttgtcaccctcgagttccaccaacactccagagtgactttcattttcgctgttttcctgttgcagagcgtttgccgcgcgcttctcgtcgcgtccaagaccctcaaagatttttggcacttcgttgagcgaggcgatatcaggtatgacagcgccctgccgcaaggccagctgcttgtccgctcggctgcggttggcacggcaggataggggtatcttgcagttttggaaaaagatgtgataggtggcaagcacctctggcacggcaaatacggggtagaagttgaggcgcgggttgggctcgcatgtgccgttttcttggcgtttggggggtacgcgcggtgagaataggtggcgttcgtaggcaaggctgacatccgctatggcgaggggcacatcgctgcgctcttgcaacgcgtcgcagataatggcgcactggcgctgcagatgcttcaacagcacgtcgtctcccacatctaggtagtcgccatgcctttcgtccccccgcccgacttgttcctcgtttgcctctgcgttgtcctggtcttgctttttatcctctgttggtactgagcggtcctcgtcgtcttcgcttacaaaacctgggtcctgctcgataatcacttcctcctcctcaagcgggggtgcctcgacggggaaggtggtaggcgcgttggcggcatcggtggaggcggtggtggcgaactcagagggggcggttaggctgtccttcttctcgactgactccatgatctttttctgcctataggagaaggaaatggccagtcgggaagaggagcagcgcgaaaccacccccgagcgcggacgcggtgcggcgcgacgtcccccaaccatggaggacgtgtcgtccccgtccccgtcgccgccgcctccccgggcgcccccaaaaaagcggatgaggcggcgtatcgagtccgaggacgaggaagactcatcacaagacgcgctggtgccgcgcacacccagcccgcggccatcgacctcggcggcggatttggccattgcgcccaagaagaaaaagaagcgcccttctcccaagcccgagcgcccgccatcaccagaggtaatcgtggacagcgaggaagaaagagaagatgtggcgctacaaatggtgggtttcagcaacccaccggtgctaatcaagcatggcaaaggaggtaagcgcacagtgcggcggctgaatgaagacgacccagtggcgcgtggtatgcggacgcaagaggaagaggaagagcccagcgaagcggaaagtgaaattacggtgatgaacccgctgagtgtgccgatcgtgtctgcgtgggagaagggcatggaggctgcgcgcgcgctgatggacaagtaccacgtggataacgatctaaaggcgaacttcaaactactgcctgaccaagtggaagctctggcggccgtatgcaagacctggctgaacgaggagcaccgcgggttgcagctgaccttcaccagcaacaagacctttgtgacgatgatggggcgattcctgcaggcgtacctgcagtcgtttgcagaggtgacctacaagcatcacgagcccacgggctgcgcgttgtggctgcaccgctgcgctgagatcgaaggcgagcttaagtgtctacacggaagcattatgataaataaggagcacgtgattgaaatggatgtgacgagcgaaaacgggcagcgcgcgctgaaggagcagtctagcaaggccaagatcgtgaagaaccggtggggccgaaatgtggtgcagatctccaacaccgacgcaaggtgctgcgtgcacgacgcggcctgtccggccaatcagttttccggcaagtcttgcggcatgttcttctctgaaggcgcaaaggctcaggtggcttttaagcagatcaaggcttttatgcaggcgctgtatcctaacgcccagaccgggcacggtcaccttttgatgccactacggtgcgagtgcaactcaaagcctgggcacgcgccctttttgggaaggcagctaccaaagttgactccgttcgccctgagcaacgcggaggacctggacgcggatctgatctccgacaagagcgtgctggccagcgtgcaccacccggcgctgatagtgttccagtgctgcaaccctgtgtatcgcaactcgcgcgcgcagggcggaggccccaactgcgacttcaagatatcggcgcccgacctgctaaacgcgttggtgatggtgcgcagcctgtggagtgaaaacttcaccgagctgccgcggatggttgtgcctgagtttaagtggagcactaaacaccagtatcgcaacgtgtccctgccagtggcgcatagcgatgcgcggcagaacccctttgatttttaa

SEQ ID NO: 4 - DNA, 4750 bp, synthetic construct
  source 1..4750: mol_type = other DNA
tgacgtagttttcgcgcttaaatttgagaaagggcgcgaaactagtccttaagagtcagcgcgcagtatttactgaagagagcctccgcgtcttccagcgtgcgccgaagctgatcttcgcttttgtgatacaggcagctgcgggtgagggatcgcagagacctgttttttattttcagctcttgttcttggcccctgctctgttgaaatatagcatacagagtgggaaaaatcctgtttctaagctcgcgggtcgatacgggttcgttgggcgccagacgcagcgctcctcctcctgctgctgccgccgctgtggatttcttgggctttgtcagagtcttgctatccggtcgcctttgcttctgtgtggccgctgctgttgctgccgctgccgccggtgcagtatgggctgtagagatgacggtagtaatgcaggatgttacgggggaaggccacgccgtgatggtagagaagaaagcggcgggcgaaggagatgttgcccccacagtcttgcaagcaagcaactatggcgttcttgtgcccgcgccatgagcggtagccttggcgctgttgttgctcttgggctaacggcggcggctgcttggacttaccggccctggttccagtggtgtcccatctacggttgggtcggcgaacgggcagtgccggcggcgcctgaggagcggaggttgtagccatgctggaaccggttgccgatttctggggcgccggcgaggggaatgcgaccgagggtgacggtgtttcgtctgacacctcttcgacctcggaagcttcctcgtctaggctctcccagtcttccatcatgtcctcctcctcctcgtccaaaacctcctctgcctgactgtcccagtattcctcctcgtccgtgggtggcggcggcagctgcagcttctttttgggtgccatcctgggaagcaagggcccgcggctgctgctgatagggctgcggcggcggggggattgggttgagctcctcgccggactgggggtccaagtaaaccccccgtccctttcgtagcagaaactcttggcgggctttgttgatggcttgcaattggccaagaatgtggccctgggtaatgacgcaggcggtaagctccgcattaggcgggcgggattggtcttcgtagaacctaatctcgtgggcgtggtagtcctcaggtacaaatttgcgaaggtaagccgacgtccacagccccggagtgagtttcaaccccggagccgcggacttttcgtcaggcgagggaccctgcagctcaaaggtaccgataatttgactttcgttaagcagctgcgaattgcaaaccagggagcggtgcggggtgcataggttgcagcgacagtgacactccagtagaccgtcaccgctcacgtcttccattatgtcagagtggtaggcaaggtagttggctagctgcagaaggtagcagtggccccaaagcggcggagggcattcgcggtacttaatgggcacaaagtcgctaggaagtgcacagcaggtggcgggcaagattcctgagcgctctaggataaagttcctaaagttctgcaacatgctttgactggtgaagtctggcagaccctgttgcagggttttaagcaggcgttcggggaaaatgatgtccgccaggtgcgcggccacggagcgctcgttgaaggccgtccataggtccttcaagttttgctttagcagtttctgcagctccttgaggttgcactcctccaagcactgctgccaaacgcccatggccgtctgccaggtgtagcatagaaataagtaaacgcagtcgcggacgtagtcgcggcgcgcctcgcccttgagcgtggaatgaagcacgttttgcccaaggcggttttcgtgcaaaattccaaggtaggagaccaggttgcagagctccacgttggagatcttgcaggcctggcgtacgtagccctgtcgaaaggtgtagtgcaatgtttcctctagcttgcgctgcatctccgggtcagcaaagaaccgctgcatgcactcaagctccacggtaacgagcactgcggccatcattagtttgcgtcgctcctccaagtcggcaggctcgcgcgtttgaagccagcgcgctagctgctcgtcgccaactgcgggtaggccctcctctgtttgttcttgcaaatttgcatccctctccaggggctgcgcacggcgcacgatcagctcactcatgactgtgctcatgaccttggggggtaggttaagtgccgggtaggcaaagtgggtgacctcgatgctgcgttttagtacggctaggcgcgcgttgtcaccctcgagttccaccaacactccagagtgactttcattttcgctgttttcctgttgcagagcgtttgccgcgcgcttctcgtcgcgtccaagaccctcaaagatttttggcacttcgttgagcgaggcgatatcaggtatgacagcgccctgccgcaaggccagctgcttgtccgctcggctgcggttggcacggcaggataggggtatcttgcagttttggaaaaagatgtgataggtggcaagcacctctggcacggcaaatacggggtagaagttgaggcgcgggttgggctcgcatgtgccgttttcttggcgtttggggggtacgcgcggtgagaataggtggcgttcgtaggcaaggctgacatccgctatggcgaggggcacatcgctgcgctcttgcaacgcgtcgcagataatggcgcactggcgctgcagatgcttcaacagcacgtcgtctcccacatctaggtagtcgccatgcctttcgtccccccgcccgacttgttcctcgtttgcctctgcgttgtcctggtcttgctttttatcctctgttggtactgagcggtcctcgtcgtcttcgcttacaaaacctgggtcctgctcgataatcacttcctcctcctcaagcgggggtgcctcgacggggaaggtggtaggcgcgttggcggcatcggtggaggcggtggtggcgaactcagagggggcggttaggctgtccttcttctcgactgactccatgatctttttctgcctataggagaaggaaatggccagtcgggaagaggagcagcgcgaaaccacccccgagcgcggacgcggtgcggcgcgacgtcccccaaccatggaggacgtgtcgtccccgtccccgtcgccgccgcctccccgggcgcccccaaaaaagcggatgaggcggcgtatcgagtccgaggacgaggaagactcatcacaagacgcgctggtgccgcgcacacccagcccgcggccatcgacctcggcggcggatttggccattgcgcccaagaagaaaaagaagcgcccttctcccaagcccgagcgcccgccatcaccagaggtaatcgtggacagcgaggaagaaagagaagatgtggcgctacaaatggtgggtttcagcaacccaccggtgctaatcaagcatggcaaaggaggtaagcgcacagtgcggcggctgaatgaagacgacccagtggcgcgtggtatgcggacgcaagaggaagaggaagagcccagcgaagcggaaagtgaaattacggtgatgaacccgctgagtgtgccgatcgtgtctgcgtgggagaagggcatggaggctgcgcgcgcgctgatggacaagtaccacgtggataacgatctaaaggcgaacttcaaactactgcctgaccaagtggaagctctggcggccgtatgcaagacctggctgaacgaggagcaccgcgggttgcagctgaccttcaccagcaacaagacctttgtgacgatgatggggcgattcctgcaggcgtacctgcagtcgtttgcagaggtgacctacaagcatcacgagcccacgggctgcgcgttgtggctgcaccgctgcgctgagatcgaaggcgagcttaagtgtctacacggaagcattatgataaataaggagcacgtgattgaaatggatgtgacgagcgaaaacgggcagcgcgcgctgaaggagcagtctagcaaggccaagatcgtgaagaaccggtggggccgaaatgtggtgcagatctccaacaccgacgcaaggtgctgcgtgcacgacgcggcctgtccggccaatcagttttccggcaagtcttgcggcatgttcttctctgaaggcgcaaaggctcaggtggcttttaagcagatcaaggcttttatgcaggcgctgtatcctaacgcccagaccgggcacggtcaccttttgatgccactacggtgcgagtgcaactcaaagcctgggcacgcgccctttttgggaaggcagctaccaaagttgactccgttcgccctgagcaacgcggaggacctggacgcggatctgatctccgacaagagcgtgctggccagcgtgcaccacccggcgctgatagtgttccagtgctgcaaccctgtgtatcgcaactcgcgcgcgcagggcggaggccccaactgcgacttcaagatatcggcgcccgacctgctaaacgcgttggtgatggtgcgcagcctgtggagtgaaaacttcaccgagctgccgcggatggttgtgcctgagtttaagtggagcactaaacaccagtatcgcaacgtgtccctgccagtggcgcatagcgatgcgcggcagaacccctttgatttttaaacggcgcagacggcaagggtgggggtaaataatcacccgagagtgtacaaataaaagcatttgcctttatt

SEQ ID NO: 5 - DNA, 308 bp, synthetic construct
  source 1..308: mol_type = other DNA
ttttagggcggagtaacttgtatgtgttgggaattgtagttttcttaaaatgggaagtgacgtaacgtgggaaaacggaagtgacgatttgaggaagttgtgggttttttggctttcgtttctgggcgtaggttcgcgtgcggttttctgggtgttttttgtggactttaaccgttacgtcattttttagtcctatatatactcgctctgcacttggcccttttttacactgtgactgattgagctggtgccgtgtcgagtggtgtttttttaataggttttcttttttactggtaaggctgactgtt

SEQ ID NO: 6 - DNA, 885 bp, synthetic construct
  source 1..885: mol_type = other DNA
atgactacgtccggcgttccatttggcatgacactacgaccaacacgatctcggttgtctcggcgcactccgtacagtagggatcgtctacctccttttgagacagaaacccgcgctaccatactggaggatcatccgctgctgcccgaatgtaacactttgacaatgcacaacgtgagttacgtgcgaggtcttccctgcagtgtgggatttacgctgattcaggaatgggttgttccctgggatatggttctaacgcgggaggagcttgtaatcctgaggaagtgtatgcacgtgtgcctgtgttgtgccaacattgatatcatgacgagcatgatgatccatggttacgagtcctgggctctccactgtcattgttccagtcccggttccctgcagtgtatagccggcgggcaggttttggccagctggtttaggatggtggtggatggcgccatgtttaatcagaggtttatatggtaccgggaggtggtgaattacaacatgccaaaagaggtaatgtttatgtccagcgtgtttatgaggggtcgccacttaatctacctgcgcttgtggtatgatggccacgtgggttctgtggtccccgccatgagctttggatacagcgccttgcactgtgggattttgaacaatattgtggtgctgtgctgcagttactgtgctgatttaagtgagatcagggtgcgctgctgtgcccggaggacaaggcgccttatgctgcgggcggtgcgaatcatcgctgaggagaccactgccatgttgtattcctgcaggacggagcggcggcggcagcagtttattcgcgcgctgctgcagcaccaccgccctatcctgatgcacgattatgactctacccccatgtag

SEQ ID NO: 7 - DNA, 279 bp, synthetic construct
  source 1..279: mol_type = other DNA
gcgtggacttctccttcgccgcccgttaagcaaccgcaagttggacagcagcctgtggctcagcagctggacagcgacatgaacttaagtgagctgcccggggagtttattaatatcactgatgagcgtttggctcgacaggaaaccgtgtggaatataacacctaagaatatgtctgttacccatgatatgatgctttttaaggccagccggggagaaaggactgtgtactctgtgtgttgggagggaggtggcaggttgaatactagggttctgtga

SEQ ID NO: 8 - DNA, 1164 bp, synthetic construct
  source 1..1164: mol_type = other DNA
atgactacgtccggcgttccatttggcatgacactacgaccaacacgatctcggttgtctcggcgcactccgtacagtagggatcgtctacctccttttgagacagaaacccgcgctaccatactggaggatcatccgctgctgcccgaatgtaacactttgacaatgcacaacgtgagttacgtgcgaggtcttccctgcagtgtgggatttacgctgattcaggaatgggttgttccctgggatatggttctaacgcgggaggagcttgtaatcctgaggaagtgtatgcacgtgtgcctgtgttgtgccaacattgatatcatgacgagcatgatgatccatggttacgagtcctgggctctccactgtcattgttccagtcccggttccctgcagtgtatagccggcgggcaggttttggccagctggtttaggatggtggtggatggcgccatgtttaatcagaggtttatatggtaccgggaggtggtgaattacaacatgccaaaagaggtaatgtttatgtccagcgtgtttatgaggggtcgccacttaatctacctgcgcttgtggtatgatggccacgtgggttctgtggtccccgccatgagctttggatacagcgccttgcactgtgggattttgaacaatattgtggtgctgtgctgcagttactgtgctgatttaagtgagatcagggtgcgctgctgtgcccggaggacaaggcgccttatgctgcgggcggtgcgaatcatcgctgaggagaccactgccatgttgtattcctgcaggacggagcggcggcggcagcagtttattcgcgcgctgctgcagcaccaccgccctatcctgatgcacgattatgactctacccccatgtaggcgtggacttctccttcgccgcccgttaagcaaccgcaagttggacagcagcctgtggctcagcagctggacagcgacatgaacttaagtgagctgcccggggagtttattaatatcactgatgagcgtttggctcgacaggaaaccgtgtggaatataacacctaagaatatgtctgttacccatgatatgatgctttttaaggccagccggggagaaaggactgtgtactctgtgtgttgggagggaggtggcaggttgaatactagggttctgtga

SEQ ID NO: 9 - DNA, 725 bp, synthetic construct
  source 1..725: mol_type = other DNA
tatccgtagatgtacctggacatccaggtgatgccggcggcggtggtggaggcgcgcggaaagtcgcggacgcggttccagatgttgcgcagcggcaaaaagtgctccatggtcgggacgctctggccggtcaggcgcgcgcaatcgttgacgctctagaccgtgcaaaaggagagcctgtaagcgggcactcttccgtggtctggtggataaattcgcaagggtatcatggcggacgaccggggttcgagccccgtatccggccgtccgccgtgatccatgcggttaccgcccgcgtgtcgaacccaggtgtgcgacgtcagacaacgggggagtgctccttttggcttccttccaggcgcggcggctgctgcgctagcttttttggccactggccgcgcgcagcgtaagcggttaggctggaaagcgaaagcattaagtggctcgctccctgtagccggagggttattttccaagggttgagtcgcgggacccccggttcgagtctcggaccggccggactgcggcgaacgggggtttgcctccccgtcatgcaagaccccgcttgcaaattcctccggaaacagggacgagccccttttttgcttttcccagatgcatccggtgctgcggcagatgcgcccccctcctcagcagcggcaagagcaagagcagcggcagacatgcagggcaccctcccctcctcctaccgcgtcaggaggggc

SEQ ID NO: 10 - DNA, 7331 bp, synthetic construct
  source 1..7331: mol_type = other DNA
ttaaaaatcaaaggggttctgccgcgcatcgctatgcgccactggcagggacacgttgcgatactggtgtttagtgctccacttaaactcaggcacaaccatccgcggcagctcggtgaagttttcactccacaggctgcgcaccatcaccaacgcgtttagcaggtcgggcgccgatatcttgaagtcgcagttggggcctccgccctgcgcgcgcgagttgcgatacacagggttgcagcactggaacactatcagcgccgggtggtgcacgctggccagcacgctcttgtcggagatcagatccgcgtccaggtcctccgcgttgctcagggcgaacggagtcaactttggtagctgccttcccaaaaagggcgcgtgcccaggctttgagttgcactcgcaccgtagtggcatcaaaaggtgaccgtgcccggtctgggcgttaggatacagcgcctgcataaaagccttgatctgcttaaaagccacctgagcctttgcgccttcagagaagaacatgccgcaagacttgccggaaaactgattggccggacaggccgcgtcgtgcacgcagcaccttgcgtcggtgttggagatctgcaccacatttcggccccaccggttcttcacgatcttggccttgctagactgctccttcagcgcgcgctgcccgttttcgctcgtcacatccatttcaatcacgtgctccttatttatcataatgcttccgtgtagacacttaagctcgccttcgatctcagcgcagcggtgcagccacaacgcgcagcccgtgggctcgtgatgcttgtaggtcacctctgcaaacgactgcaggtacgcctgcaggaatcgccccatcatcgtcacaaaggtcttgttgctggtgaaggtcagctgcaacccgcggtgctcctcgttcagccaggtcttgcatacggccgccagagcttccacttggtcaggcagtagtttgaagttcgcctttagatcgttatccacgtggtacttgtccatcagcgcgcgcgcagcctccatgcccttctcccacgcagacacgatcggcacactcagcgggttcatcaccgtaatttcactttccgcttcgctgggctcttcctcttcctcttgcgtccgcataccacgcgccactgggtcgtcttcattcagccgccgcactgtgcgcttacctcctttgccatgcttgattagcaccggtgggttgctgaaacccaccatttgtagcgccacatcttctctttcttcctcgctgtccacgattacctctggtgatggcgggcgctcgggcttgggagaagggcgcttctttttcttcttgggcgcaatggccaaatccgccgccgaggtcgatggccgcgggctgggtgtgcgcggcaccagcgcgtcttgtgatgagtcttcctcgtcctcggactcgatacgccgcctcatccgcttttttgggggcgcccggggaggcggcggcgacggggacggggacgacacgtcctccatggttgggggacgtcgcgccgcaccgcgtccgcgctcgggggtggtttcgcgctgctcctcttcccgactggccatttccttctcctataggcagaaaaagatcatggagtcagtcgagaagaaggacagcctaaccgccccctctgagttcgccaccaccgcctccaccgatgccgccaacgcgcctaccaccttccccgtcgaggcacccccgcttgaggaggaggaagtgattatcgagcaggacccaggttttgtaagcgaagacgacgaggaccgctcagtaccaacagaggataaaaagcaagaccaggacaacgcagaggcaaacgaggaacaagtcgggcggggggacgaaaggcatggcgactacctagatgtgggagacgacgtgctgttgaagcatctgcagcgccagtgcgccattatctgcgacgcgttgcaagagcgcagcgatgtgcccctcgccatagcggatgtcagccttgcctacgaacgccacctattctcaccgcgcgtaccccccaaacgccaagaaaacggcacatgcgagcccaacccgcgcctcaacttctaccccgtatttgccgtgccagaggtgcttgccacctatcacatctttttccaaaactgcaagatacccctatcctgccgtgccaaccgcagccgagcggacaagcagctggccttgcggcagggcgctgtcatacctgatatcgcctcgctcaacgaagtgccaaaaatctttgagggtcttggacgcgacgagaagcgcgcggcaaacgctctgcaacaggaaaacagcgaaaatgaaagtcactctggagtgttggtggaactcgagggtgacaacgcgcgcctagccgtactaaaacgcagcatcgaggtcacccactttgcctacccggcacttaacctaccccccaaggtcatgagcacagtcatgagtgagctgatcgtgcgccgtgcgcagcccctggagagggatgcaaatttgcaagaacaaacagaggagggcctacccgcagttggcgacgagcagctagcgcgctggcttcaaacgcgcgagcctgccgacttggaggagcgacgcaaactaatgatggccgcagtgctcgttaccgtggagcttgagtgcatgcagcggttctttgctgacccggagatgcagcgcaagctagaggaaacattgcactacacctttcgacagggctacgtacgccaggcctgcaagatctccaacgtggagctctgcaacctggtctcctaccttggaattttgcacgaaaaccgccttgggcaaaacgtgcttcattccacgctcaagggcgaggcgcgccgcgactacgtccgcgactgcgtttacttatttctatgctacacctggcagacggccatgggcgtttggcagcagtgcttggaggagtgcaacctcaaggagctgcagaaactgctaaagcaaaacttgaaggacctatggacggccttcaacgagcgctccgtggccgcgcacctggcggacatcattttccccgaacgcctgcttaaaaccctgcaacagggtctgccagacttcaccagtcaaagcatgttgcagaactttaggaactttatcctagagcgctcaggaatcttgcccgccacctgctgtgcacttcctagcgactttgtgcccattaagtaccgcgaatgccctccgccgctttggggccactgctaccttctgcagctagccaactaccttgcctaccactctgacataatggaagacgtgagcggtgacggtctactggagtgtcactgtcgctgcaacctatgcaccccgcaccgctccctggtttgcaattcgcagctgcttaacgaaagtcaaattatcggtacctttgagctgcagggtccctcgcctgacgaaaagtccgcggctccggggttgaaactcactccggggctgtggacgtcggcttaccttcgcaaatttgtacctgaggactaccacgcccacgagattaggttctacgaagaccaatcccgcccgcctaatgcggagcttaccgcctgcgtcattacccagggccacattcttggccaattgcaagccatcaacaaagcccgccaagagtttctgctacgaaagggacggggggtttacttggacccccagtccggcgaggagctcaacccaatccccccgccgccgcagccctatcagcagcagccgcgggcccttgcttcccaggatggcacccaaaaagaagctgcagctgccgccgccacccacggacgaggaggaatactgggacagtcaggcagaggaggttttggacgaggaggaggaggacatgatggaagactgggagagcctagacgaggaagcttccgaggtcgaagaggtgtcagacgaaacaccgtcaccctcggtcgcattcccctcgccggcgccccagaaatcggcaaccggttccagcatggctacaacctccgctcctcaggcgccgccggcactgcccgttcgccgacccaaccgtagatgggacaccactggaaccagggccggtaagtccaagcagccgccgccgttagcccaagagcaacaacagcgccaaggctaccgctcatggcgcgggcacaagaacgccatagttgcttgcttgcaagactgtgggggcaacatctccttcgcccgccgctttcttctctaccatcacggcgtggccttcccccgtaacatcctgcattactaccgtcatctctacagcccatactgcaccggcggcagcggcagcaacagcagcggccacacagaagcaaaggcgaccggatagcaagactctgacaaagcccaagaaatccacagcggcggcagcagcaggaggaggagcgctgcgtctggcgcccaacgaacccgtatcgacccgcgagcttagaaacaggatttttcccactctgtatgctatatttcaacagagcaggggccaagaacaagagctgaaaataaaaaacaggtctctgcgatccctcacccgcagctgcctgtatcacaaaagcgaagatcagcttcggcgcacgctggaagacgcggaggctctcttcagtaaatactgcgcgctgactcttaaggactagtttcgcgccctttctcaaatttaagcgcgaaaactacgtcatctccagcggccacacccggcgccagcacctgttgtcagcgccattttttagggcggagtaacttgtatgtgttgggaattgtagttttcttaaaatgggaagtgacgtaacgtgggaaaacggaagtgacgatttgaggaagttgtgggttttttggctttcgtttctgggcgtaggttcgcgtgcggttttctgggtgttttttgtggactttaaccgttacgtcattttttagtcctatatatactcgctctgcacttggcccttttttacactgtgactgattgagctggtgccgtgtcgagtggtgtttttttaataggttttcttttttactggtaaggctgactgttatgactacgtccggcgttccatttggcatgacactacgaccaacacgatctcggttgtctcggcgcactccgtacagtagggatcgtctacctccttttgagacagaaacccgcgctaccatactggaggatcatccgctgctgcccgaatgtaacactttgacaatgcacaacgtgagttacgtgcgaggtcttccctgcagtgtgggatttacgctgattcaggaatgggttgttccctgggatatggttctaacgcgggaggagcttgtaatcctgaggaagtgtatgcacgtgtgcctgtgttgtgccaacattgatatcatgacgagcatgatgatccatggttacgagtcctgggctctccactgtcattgttccagtcccggttccctgcagtgtatagccggcgggcaggttttggccagctggtttaggatggtggtggatggcgccatgtttaatcagaggtttatatggtaccgggaggtggtgaattacaacatgccaaaagaggtaatgtttatgtccagcgtgtttatgaggggtcgccacttaatctacctgcgcttgtggtatgatggccacgtgggttctgtggtccccgccatgagctttggatacagcgccttgcactgtgggattttgaacaatattgtggtgctgtgctgcagttactgtgctgatttaagtgagatcagggtgcgctgctgtgcccggaggacaaggcgccttatgctgcgggcggtgcgaatcatcgctgaggagaccactgccatgttgtattcctgcaggacggagcggcggcggcagcagtttattcgcgcgctgctgcagcaccaccgccctatcctgatgcacgattatgactctacccccatgtaggcgtggacttctccttcgccgcccgttaagcaaccgcaagttggacagcagcctgtggctcagcagctggacagcgacatgaacttaagtgagctgcccggggagtttattaatatcactgatgagcgtttggctcgacaggaaaccgtgtggaatataacacctaagaatatgtctgttacccatgatatgatgctttttaaggccagccggggagaaaggactgtgtactctgtgtgttgggagggaggtggcaggttgaatactagggttctgtgagtttgattaaggtacggtgatctgtataagctatgtggtggtggggctatactactgaatgaaaaatgacttgaaattttctgcaattgaaaaataaacacgttgaaacataacacaaacgattctttattcttgggcaatgtatgaaaaagtgtaagaggatgtggcaaatatttcattaatgtagttgtggccagaccagtcccatgaaaatgacatagagtatgcacttggagttgtgtctcctgtttcctgtgtaccgtttagtgtaatggttagtgttacaggtttagttttgtctccgtttaagtaaacttgactgacaatgttacttttggcagttttaccgtgagattttggataagctgataggttaggcataaatccaacagcgtttgtataggctgtcgcccctcctgacgcggtaggaggaggggagggtgccctgcatgtctgccgctgctcttgctcttgccgctgctgaggaggggggcgcatctgccgcagcaccggatgcatctgggaaaagcaaaaaaggggctcgtccctgtttccggaggaatttgcaagcggggtcttgcatgacggggaggcaaacccccgttcgccgcagtccggccggtccgagactcgaaccgggggtcccgcgactcaacccttggaaaataaccctccggctacagggagcgagccacttaatgctttcgctttccagcctaaccgcttacgctgcgcgcggccagtggccaaaaaagctagcgcagcagccgccgcgcctggaaggaagccaaaaggagcactcccccgttgtctgacgtcgcacacctgggttcgacacgcgggcggtaaccgcatggatcacggcggacggccggatacggggctcgaaccccggtcgtccgccatgatacccttgcgaatttatccaccagaccacggaagagtgcccgcttacaggctctccttttgcacggtctagagcgtcaacgattgcgcgcgcctgaccggccagagcgtcccgaccatggagcactttttgccgctgcgcaacatctggaaccgcgtccgcgactttccgcgcgcctccaccaccgccgccggcatcacctggatgtccaggtacatctacggata

SEQ ID NO: 11 - DNA, 7402 bp, synthetic construct
  source 1..7402: mol_type = other DNA
aataaaggcaaatgcttttatttgtacactctcgggtgattatttacccccacccttgccgtctgcgccgtttaaaaatcaaaggggttctgccgcgcatcgctatgcgccactggcagggacacgttgcgatactggtgtttagtgctccacttaaactcaggcacaaccatccgcggcagctcggtgaagttttcactccacaggctgcgcaccatcaccaacgcgtttagcaggtcgggcgccgatatcttgaagtcgcagttggggcctccgccctgcgcgcgcgagttgcgatacacagggttgcagcactggaacactatcagcgccgggtggtgcacgctggccagcacgctcttgtcggagatcagatccgcgtccaggtcctccgcgttgctcagggcgaacggagtcaactttggtagctgccttcccaaaaagggcgcgtgcccaggctttgagttgcactcgcaccgtagtggcatcaaaaggtgaccgtgcccggtctgggcgttaggatacagcgcctgcataaaagccttgatctgcttaaaagccacctgagcctttgcgccttcagagaagaacatgccgcaagacttgccggaaaactgattggccggacaggccgcgtcgtgcacgcagcaccttgcgtcggtgttggagatctgcaccacatttcggccccaccggttcttcacgatcttggccttgctagactgctccttcagcgcgcgctgcccgttttcgctcgtcacatccatttcaatcacgtgctccttatttatcataatgcttccgtgtagacacttaagctcgccttcgatctcagcgcagcggtgcagccacaacgcgcagcccgtgggctcgtgatgcttgtaggtcacctctgcaaacgactgcaggtacgcctgcaggaatcgccccatcatcgtcacaaaggtcttgttgctggtgaaggtcagctgcaacccgcggtgctcctcgttcagccaggtcttgcatacggccgccagagcttccacttggtcaggcagtagtttgaagttcgcctttagatcgttatccacgtggtacttgtccatcagcgcgcgcgcagcctccatgcccttctcccacgcagacacgatcggcacactcagcgggttcatcaccgtaatttcactttccgcttcgctgggctcttcctcttcctcttgcgtccgcataccacgcgccactgggtcgtcttcattcagccgccgcactgtgcgcttacctcctttgccatgcttgattagcaccggtgggttgctgaaacccaccatttgtagcgccacatcttctctttcttcctcgctgtccacgattacctctggtgatggcgggcgctcgggcttgggagaagggcgcttctttttcttcttgggcgcaatggccaaatccgccgccgaggtcgatggccgcgggctgggtgtgcgcggcaccagcgcgtcttgtgatgagtcttcctcgtcctcggactcgatacgccgcctcatccgcttttttgggggcgcccggggaggcggcggcgacggggacggggacgacacgtcctccatggttgggggacgtcgcgccgcaccgcgtccgcgctcgggggtggtttcgcgctgctcctcttcccgactggccatttccttctcctataggcagaaaaagatcatggagtcagtcgagaagaaggacagcctaaccgccccctctgagttcgccaccaccgcctccaccgatgccgccaacgcgcctaccaccttccccgtcgaggcacccccgcttgaggaggaggaagtgattatcgagcaggacccaggttttgtaagcgaagacgacgaggaccgctcagtaccaacagaggataaaaagcaagaccaggacaacgcagaggcaaacgaggaacaagtcgggcggggggacgaaaggcatggcgactacctagatgtgggagacgacgtgctgttgaagcatctgcagcgccagtgcgccattatctgcgacgcgttgcaagagcgcagcgatgtgcccctcgccatagcggatgtcagccttgcctacgaacgccacctattctcaccgcgcgtaccccccaaacgccaagaaaacggcacatgcgagcccaacccgcgcctcaacttctaccccgtatttgccgtgccagaggtgcttgccacctatcacatctttttccaaaactgcaagatacccctatcctgccgtgccaaccgcagccgagcggacaagcagctggccttgcggcagggcgctgtcatacctgatatcgcctcgctcaacgaagtgccaaaaatctttgagggtcttggacgcgacgagaagcgcgcggcaaacgctctgcaacaggaaaacagcgaaaatgaaagtcactctggagtgttggtggaactcgagggtgacaacgcgcgcctagccgtactaaaacgcagcatcgaggtcacccactttgcctacccggcacttaacctaccccccaaggtcatgagcacagtcatgagtgagctgatcgtgcgccgtgcgcagcccctggagagggatgcaaatttgcaagaacaaacagaggagggcctacccgcagttggcgacgagcagctagcgcgctggcttcaaacgcgcgagcctgccgacttggaggagcgacgcaaactaatgatggccgcagtgctcgttaccgtggagcttgagtgcatgcagcggttctttgctgacccggagatgcagcgcaagctagaggaaacattgcactacacctttcgacagggctacgtacgccaggcctgcaagatctccaacgtggagctctgcaacctggtctcctaccttggaattttgcacgaaaaccgccttgggcaaaacgtgcttcattccacgctcaagggcgaggcgcgccgcgactacgtccgcgactgcgtttacttatttctatgctacacctggcagacggccatgggcgtttggcagcagtgcttggaggagtgcaacctcaaggagctgcagaaactgctaaagcaaaacttgaaggacctatggacggccttcaacgagcgctccgtggccgcgcacctggcggacatcattttccccgaacgcctgcttaaaaccctgcaacagggtctgccagacttcaccagtcaaagcatgttgcagaactttaggaactttatcctagagcgctcaggaatcttgcccgccacctgctgtgcacttcctagcgactttgtgcccattaagtaccgcgaatgccctccgccgctttggggccactgctaccttctgcagctagccaactaccttgcctaccactctgacataatggaagacgtgagcggtgacggtctactggagtgtcactgtcgctgcaacctatgcaccccgcaccgctccctggtttgcaattcgcagctgcttaacgaaagtcaaattatcggtacctttgagctgcagggtccctcgcctgacgaaaagtccgcggctccggggttgaaactcactccggggctgtggacgtcggcttaccttcgcaaatttgtacctgaggactaccacgcccacgagattaggttctacgaagaccaatcccgcccgcctaatgcggagcttaccgcctgcgtcattacccagggccacattcttggccaattgcaagccatcaacaaagcccgccaagagtttctgctacgaaagggacggggggtttacttggacccccagtccggcgaggagctcaacccaatccccccgccgccgcagccctatcagcagcagccgcgggcccttgcttcccaggatggcacccaaaaagaagctgcagctgccgccgccacccacggacgaggaggaatactgggacagtcaggcagaggaggttttggacgaggaggaggaggacatgatggaagactgggagagcctagacgaggaagcttccgaggtcgaagaggtgtcagacgaaacaccgtcaccctcggtcgcattcccctcgccggcgccccagaaatcggcaaccggttccagcatggctacaacctccgctcctcaggcgccgccggcactgcccgttcgccgacccaaccgtagatgggacaccactggaaccagggccggtaagtccaagcagccgccgccgttagcccaagagcaacaacagcgccaaggctaccgctcatggcgcgggcacaagaacgccatagttgcttgcttgcaagactgtgggggcaacatctccttcgcccgccgctttcttctctaccatcacggcgtggccttcccccgtaacatcctgcattactaccgtcatctctacagcccatactgcaccggcggcagcggcagcaacagcagcggccacacagaagcaaaggcgaccggatagcaagactctgacaaagcccaagaaatccacagcggcggcagcagcaggaggaggagcgctgcgtctggcgcccaacgaacccgtatcgacccgcgagcttagaaacaggatttttcccactctgtatgctatatttcaacagagcaggggccaagaacaagagctgaaaataaaaaacaggtctctgcgatccctcacccgcagctgcctgtatcacaaaagcgaagatcagcttcggcgcacgctggaagacgcggaggctctcttcagtaaatactgcgcgctgactcttaaggactagtttcgcgccctttctcaaatttaagcgcgaaaactacgtcatctccagcggccacacccggcgccagcacctgttgtcagcgccattttttagggcggagtaacttgtatgtgttgggaattgtagttttcttaaaatgggaagtgacgtaacgtgggaaaacggaagtgacgatttgaggaagttgtgggttttttggctttcgtttctgggcgtaggttcgcgtgcggttttctgggtgttttttgtggactttaaccgttacgtcattttttagtcctatatatactcgctctgcacttggcccttttttacactgtgactgattgagctggtgccgtgtcgagtggtgtttttttaataggttttcttttttactggtaaggctgactgttatgactacgtccggcgttccatttggcatgacactacgaccaacacgatctcggttgtctcggcgcactccgtacagtagggatcgtctacctccttttgagacagaaacccgcgctaccatactggaggatcatccgctgctgcccgaatgtaacactttgacaatgcacaacgtgagttacgtgcgaggtcttccctgcagtgtgggatttacgctgattcaggaatgggttgttccctgggatatggttctaacgcgggaggagcttgtaatcctgaggaagtgtatgcacgtgtgcctgtgttgtgccaacattgatatcatgacgagcatgatgatccatggttacgagtcctgggctctccactgtcattgttccagtcccggttccctgcagtgtatagccggcgggcaggttttggccagctggtttaggatggtggtggatggcgccatgtttaatcagaggtttatatggtaccgggaggtggtgaattacaacatgccaaaagaggtaatgtttatgtccagcgtgtttatgaggggtcgccacttaatctacctgcgcttgtggtatgatggccacgtgggttctgtggtccccgccatgagctttggatacagcgccttgcactgtgggattttgaacaatattgtggtgctgtgctgcagttactgtgctgatttaagtgagatcagggtgcgctgctgtgcccggaggacaaggcgccttatgctgcgggcggtgcgaatcatcgctgaggagaccactgccatgttgtattcctgcaggacggagcggcggcggcagcagtttattcgcgcgctgctgcagcaccaccgccctatcctgatgcacgattatgactctacccccatgtaggcgtggacttctccttcgccgcccgttaagcaaccgcaagttggacagcagcctgtggctcagcagctggacagcgacatgaacttaagtgagctgcccggggagtttattaatatcactgatgagcgtttggctcgacaggaaaccgtgtggaatataacacctaagaatatgtctgttacccatgatatgatgctttttaaggccagccggggagaaaggactgtgtactctgtgtgttgggagggaggtggcaggttgaatactagggttctgtgagtttgattaaggtacggtgatctgtataagctatgtggtggtggggctatactactgaatgaaaaatgacttgaaattttctgcaattgaaaaataaacacgttgaaacataacacaaacgattctttattcttgggcaatgtatgaaaaagtgtaagaggatgtggcaaatatttcattaatgtagttgtggccagaccagtcccatgaaaatgacatagagtatgcacttggagttgtgtctcctgtttcctgtgtaccgtttagtgtaatggttagtgttacaggtttagttttgtctccgtttaagtaaacttgactgacaatgttacttttggcagttttaccgtgagattttggataagctgataggttaggcataaatccaacagcgtttgtataggctgtcgcccctcctgacgcggtaggaggaggggagggtgccctgcatgtctgccgctgctcttgctcttgccgctgctgaggaggggggcgcatctgccgcagcaccggatgcatctgggaaaagcaaaaaaggggctcgtccctgtttccggaggaatttgcaagcggggtcttgcatgacggggaggcaaacccccgttcgccgcagtccggccggtccgagactcgaaccgggggtcccgcgactcaacccttggaaaataaccctccggctacagggagcgagccacttaatgctttcgctttccagcctaaccgcttacgctgcgcgcggccagtggccaaaaaagctagcgcagcagccgccgcgcctggaaggaagccaaaaggagcactcccccgttgtctgacgtcgcacacctgggttcgacacgcgggcggtaaccgcatggatcacggcggacggccggatacggggctcgaaccccggtcgtccgccatgatacccttgcgaatttatccaccagaccacggaagagtgcccgcttacaggctctccttttgcacggtctagagcgtcaacgattgcgcgcgcctgaccggccagagcgtcccgaccatggagcactttttgccgctgcgcaacatctggaaccgcgtccgcgactttccgcgcgcctccaccaccgccgccggcatcacctggatgtccaggtacatctacggata

SEQ ID NO: 12 - DNA, 2121 bp, synthetic construct
  source 1..2121: mol_type = other DNA
atgagctcagggaatatgaaagacaagcatcgctcctacaaaagaaaagggagtccagaaagaggggagaggaagagacactggcagacaactcatcacaggagcaggagccgcagcccgatccgacacagtggggagagaggctcgggctcatatcatcaggaacacccaatcagccacctatcgtcttgcactgcttcgaagacctcagaccaagtgatgaagacgagggagagtacatcggggaaaaaagacaatagaacaaatccatacactgtattcagtcaacacagagcttccaatcctgaagctccagggtggtgtgggttctactggcactctactcgcattgctagagatggtactaattcaatctttaatgaaatgaaacaacagtttcaacagctacaaattgataataaaataggatgggataacactagagaactattgtttaatcaaaagaaaacactagatcaaaaatacagaaatatgttctggcactttagaaataactctgattgtgaaagatgtaattactgggatgatgtgtaccgtagacacttagctaatgtttcctcacagacagaagcagacgagataactgacgaggaaatgctttctgctgctgaaagcatggaagcagatgcctccaatgctactaacttcagcctgctgaagcaggctggagacgtggaggagaaccctggacctatggctttcaatcctcctgtgattagagctttttctcaacctgcttttacttatgtcttcaaatttccatatccacaatggaaagaaaaagaatggctgcttcatgcacttttagctcatggaactgaacaatctatgatacaattaagaaactgcgctcctcatccggatgaagacataatccgtgatgacttgcttatttctttagaagatcgccattttggggctgttctctgcaaggctgtttacatggcaacaactactctcatgtcacacaaacaaaggaatatgtttcctcgttgtgacatcatagttcagtctgagctaggagagaaaaacttacactgccatattatagttgggggagaaggactaagcaagaggaatgctaaatcatcctgtgctcagttctatggtttaatactagctgaaataattcaacgctgcaaatctcttctggctacacgtccttttgaacctgaagaggctgacatatttcacactttaaaaaaggctgagcgagaggcatggggtggagttactggcggcaacatgcaaatccttcaatatagagatcgcagaggagaccttcatgcacaaacagtggatcctcttcgcttcttcaaaaactaccttttacctaaaaatagatgtatttcatcttacaaacctgatgtttgtacttctcctgacaactggttcattttagctgaaaaaacttactctcacactcttattaacgggctgccgcttccagaacattacagaaaaaactaccacgcaaccctagataacgaagtcattccagggcctcaaacaatggcctatggaggacgtggtccgtgggaacatcttccttttacacttcacgaaaacggatactgcactgattgcggtggttaccttcctcatagtgctgacaattctatgtacactgatcgcgcaagcgaaactagcacaggagacatcacaccagacttgggggattcggacggagaagacaccaagcctgagacatcgcaagtggactattgtccacccaagaaacgtcgtctaactgctccagcaagtcctccaaactcacctgcgagctctgtaagtactattactttctttaacacttggcacgcacagccacgtgacgaagatgagctcagggaatatgaaagacaagcatcgctcctacaaaagaaaagggagtccagaaagaggggagaggaagagacactggcagacaactcatcacaggagcaggagccgcagcccgatccgacacagtggggagagaggctcgggctcatatcatcaggaacacccaatcagccacctatcgtcttgcactgcttcgaagacctcagaccaagtgatgaagacgagggagagtacatcggggaaaaaagacaatag

SEQ ID NO: 13 - DNA, 10985 bp, synthetic construct
  source 1..10985: mol_type = other DNA
ttaaaaatcaaaggggttctgccgcgcatcgctatgcgccactggcagggacacgttgcgatactggtgtttagtgctccacttaaactcaggcacaaccatccgcggcagctcggtgaagttttcactccacaggctgcgcaccatcaccaacgcgtttagcaggtcgggcgccgatatcttgaagtcgcagttggggcctccgccctgcgcgcgcgagttgcgatacacagggttgcagcactggaacactatcagcgccgggtggtgcacgctggccagcacgctcttgtcggagatcagatccgcgtccaggtcctccgcgttgctcagggcgaacggagtcaactttggtagctgccttcccaaaaagggcgcgtgcccaggctttgagttgcactcgcaccgtagtggcatcaaaaggtgaccgtgcccggtctgggcgttaggatacagcgcctgcataaaagccttgatctgcttaaaagccacctgagcctttgcgccttcagagaagaacatgccgcaagacttgccggaaaactgattggccggacaggccgcgtcgtgcacgcagcaccttgcgtcggtgttggagatctgcaccacatttcggccccaccggttcttcacgatcttggccttgctagactgctccttcagcgcgcgctgcccgttttcgctcgtcacatccatttcaatcacgtgctccttatttatcataatgcttccgtgtagacacttaagctcgccttcgatctcagcgcagcggtgcagccacaacgcgcagcccgtgggctcgtgatgcttgtaggtcacctctgcaaacgactgcaggtacgcctgcaggaatcgccccatcatcgtcacaaaggtcttgttgctggtgaaggtcagctgcaacccgcggtgctcctcgttcagccaggtcttgcatacggccgccagagcttccacttggtcaggcagtagtttgaagttcgcctttagatcgttatccacgtggtacttgtccatcagcgcgcgcgcagcctccatgcccttctcccacgcagacacgatcggcacactcagcgggttcatcaccgtaatttcactttccgcttcgctgggctcttcctcttcctcttgcgtccgcataccacgcgccactgggtcgtcttcattcagccgccgcactgtgcgcttacctcctttgccatgcttgattagcaccggtgggttgctgaaacccaccatttgtagcgccacatcttctctttcttcctcgctgtccacgattacctctggtgatggcgggcgctcgggcttgggagaagggcgcttctttttcttcttgggcgcaatggccaaatccgccgccgaggtcgatggccgcgggctgggtgtgcgcggcaccagcgcgtcttgtgatgagtcttcctcgtcctcggactcgatacgccgcctcatccgcttttttgggggcgcccggggaggcggcggcgacggggacggggacgacacgtcctccatggttgggggacgtcgcgccgcaccgcgtccgcgctcgggggtggtttcgcgctgctcctcttcccgactggccatttccttctcctataggcagaaaaagatcatggagtcagtcgagaagaaggacagcctaaccgccccctctgagttcgccaccaccgcctccaccgatgccgccaacgcgcctaccaccttccccgtcgaggcacccccgcttgaggaggaggaagtgattatcgagcaggacccaggttttgtaagcgaagacgacgaggaccgctcagtaccaacagaggataaaaagcaagaccaggacaacgcagaggcaaacgaggaacaagtcgggcggggggacgaaaggcatggcgactacctagatgtgggagacgacgtgctgttgaagcatctgcagcgccagtgcgccattatctgcgacgcgttgcaagagcgcagcgatgtgcccctcgccatagcggatgtcagccttgcctacgaacgccacctattctcaccgcgcgtaccccccaaacgccaagaaaacggcacatgcgagcccaacccgcgcctcaacttctaccccgtatttgccgtgccagaggtgcttgccacctatcacatctttttccaaaactgcaagatacccctatcctgccgtgccaaccgcagccgagcggacaagcagctggccttgcggcagggcgctgtcatacctgatatcgcctcgctcaacgaagtgccaaaaatctttgagggtcttggacgcgacgagaagcgcgcggcaaacgctctgcaacaggaaaacagcgaaaatgaaagtcactctggagtgttggtggaactcgagggtgacaacgcgcgcctagccgtactaaaacgcagcatcgaggtcacccactttgcctacccggcacttaacctaccccccaaggtcatgagcacagtcatgagtgagctgatcgtgcgccgtgcgcagcccctggagagggatgcaaatttgcaagaacaaacagaggagggcctacccgcagttggcgacgagcagctagcgcgctggcttcaaacgcgcgagcctgccgacttggaggagcgacgcaaactaatgatggccgcagtgctcgttaccgtggagcttgagtgcatgcagcggttctttgctgacccggagatgcagcgcaagctagaggaaacattgcactacacctttcgacagggctacgtacgccaggcctgcaagatctccaacgtggagctctgcaacctggtctcctaccttggaattttgcacgaaaaccgccttgggcaaaacgtgcttcattccacgctcaagggcgaggcgcgccgcgactacgtccgcgactgcgtttacttatttctatgctacacctggcagacggccatgggcgtttggcagcagtgcttggaggagtgcaacctcaaggagctgcagaaactgctaaagcaaaacttgaaggacctatggacggccttcaacgagcgctccgtggccgcgcacctggcggacatcattttccccgaacgcctgcttaaaaccctgcaacagggtctgccagacttcaccagtcaaagcatgttgcagaactttaggaactttatcctagagcgctcaggaatcttgcccgccacctgctgtgcacttcctagcgactttgtgcccattaagtaccgcgaatgccctccgccgctttggggccactgctaccttctgcagctagccaactaccttgcctaccactctgacataatggaagacgtgagcggtgacggtctactggagtgtcactgtcgctgcaacctatgcaccccgcaccgctccctggtttgcaattcgcagctgcttaacgaaagtcaaattatcggtacctttgagctgcagggtccctcgcctgacgaaaagtccgcggctccggggttgaaactcactccggggctgtggacgtcggcttaccttcgcaaatttgtacctgaggactaccacgcccacgagattaggttctacgaagaccaatcccgcccgcctaatgcggagcttaccgcctgcgtcattacccagggccacattcttggccaattgcaagccatcaacaaagcccgccaagagtttctgctacgaaagggacggggggtttacttggacccccagtccggcgaggagctcaacccaatccccccgccgccgcagccctatcagcagcagccgcgggcccttgcttcccaggatggcacccaaaaagaagctgcagctgccgccgccacccacggacgaggaggaatactgggacagtcaggcagaggaggttttggacgaggaggaggaggacatgatggaagactgggagagcctagacgaggaagcttccgaggtcgaagaggtgtcagacgaaacaccgtcaccctcggtcgcattcccctcgccggcgccccagaaatcggcaaccggttccagcatggctacaacctccgctcctcaggcgccgccggcactgcccgttcgccgacccaaccgtagatgggacaccactggaaccagggccggtaagtccaagcagccgccgccgttagcccaagagcaacaacagcgccaaggctaccgctcatggcgcgggcacaagaacgccatagttgcttgcttgcaagactgtgggggcaacatctccttcgcccgccgctttcttctctaccatcacggcgtggccttcccccgtaacatcctgcattactaccgtcatctctacagcccatactgcaccggcggcagcggcagcaacagcagcggccacacagaagcaaaggcgaccggatagcaagactctgacaaagcccaagaaatccacagcggcggcagcagcaggaggaggagcgctgcgtctggcgcccaacgaacccgtatcgacccgcgagcttagaaacaggatttttcccactctgtatgctatatttcaacagagcaggggccaagaacaagagctgaaaataaaaaacaggtctctgcgatccctcacccgcagctgcctgtatcacaaaagcgaagatcagcttcggcgcacgctggaagacgcggaggctctcttcagtaaatactgcgcgctgactcttaaggactagtttcgcgccctttctcaaatttaagcgcgaaaactacgtcatctccagcggccacacccggcgccagcacctgttgtcagcgccattttttagggcggagtaacttgtatgtgttgggaattgtagttttcttaaaatgggaagtgacgtaacgtgggaaaacggaagtgacgatttgaggaagttgtgggttttttggctttcgtttctgggcgtaggttcgcgtgcggttttctgggtgttttttgtggactttaaccgttacgtcattttttagtcctatatatactcgctctgcacttggcccttttttacactgtgactgattgagctggtgccgtgtcgagtggtgtttttttaataggttttcttttttactggtaaggctgactgttatgattcgctgcttgaggctgaaggtggagggcgctctggagcagatttttacaatggccggacttaatattcgggatttgcttagagatatattgagaaggtggcgagatgagaattatttgggcatggttgaaggtgctggaatgtttatagaggagattcaccctgaagggtttagcctttacgtccacttggacgtgagggccgtttgccttttggaagccattgtgcaacatcttacaaatgccattatctgttctttggctgtagagtttgaccacgccaccggaggggagcgcgttcacttaatagatcttcattttgaggttttggataatcttttggaataaaaaaaaaaaacatggttcttccagctcttcccgctcctcccgtgtgtgactcgcagaacgaatgtgtaggttggctgggtgtggcttattctgcggtggtggatgttatcagggcagcggcgcatgaaggagtttacatagaacccgaagccagggggcgcctggatgctttgagagagtggatatactacaactactacacagagcgatctaagcggcgagaccggagacgcagatctgtttgtcacgcccgcacctggttttgcttcaggaaatatgactacgtccggcgttccatttggcatgacactacgaccaacacgatctcggttgtctcggcgcactccgtacagtagggatcgtctacctccttttgagacagaaacccgcgctaccatactggaggatcatccgctgctgcccgaatgtaacactttgacaatgcacaacgtgagttacgtgcgaggtcttccctgcagtgtgggatttacgctgattcaggaatgggttgttccctgggatatggttctaacgcgggaggagcttgtaatcctgaggaagtgtatgcacgtgtgcctgtgttgtgccaacattgatatcatgacgagcatgatgatccatggttacgagtcctgggctctccactgtcattgttccagtcccggttccctgcagtgtatagccggcgggcaggttttggccagctggtttaggatggtggtggatggcgccatgtttaatcagaggtttatatggtaccgggaggtggtgaattacaacatgccaaaagaggtaatgtttatgtccagcgtgtttatgaggggtcgccacttaatctacctgcgcttgtggtatgatggccacgtgggttctgtggtccccgccatgagctttggatacagcgccttgcactgtgggattttgaacaatattgtggtgctgtgctgcagttactgtgctgatttaagtgagatcagggtgcgctgctgtgcccggaggacaaggcgccttatgctgcgggcggtgcgaatcatcgctgaggagaccactgccatgttgtattcctgcaggacggagcggcggcggcagcagtttattcgcgcgctgctgcagcaccaccgccctatcctgatgcacgattatgactctacccccatgtaggcgtggacttctccttcgccgcccgttaagcaaccgcaagttggacagcagcctgtggctcagcagctggacagcgacatgaacttaagtgagctgcccggggagtttattaatatcactgatgagcgtttggctcgacaggaaaccgtgtggaatataacacctaagaatatgtctgttacccatgatatgatgctttttaaggccagccggggagaaaggactgtgtactctgtgtgttgggagggaggtggcaggttgaatactagggttctgtgagtttgattaaggtacggtgatctgtataagctatgtggtggtggggctatactactgaatgaaaaatgacttgaaattttctgcaattgaaaaataaacacgttgaaacataacacaaacgattctttattcttgggcaatgtatgaaaaagtgtaagaggatgtggcaaatatttcattaatgtagttgtggccagaccagtcccatgaaaatgacatagagtatgcacttggagttgtgtctcctgtttcctgtgtaccgtttagtgtaatggttagtgttacaggtttagttttgtctccgtttaagtaaacttgactgacaatgttacttttggcagttttaccgtgagattttggataagctgataggttaggcataaatccaacagcgtttgtataggctgtcgacattgattattgactagttattaatagtaatcaattacggggtcattagttcatagcccatatatggagttccgcgttacataacttacggtaaatggcccgcctggctgaccgcccaacgacccccgcccattgacgtcaataatgacgtatgttcccatagtaacgccaatagggactttccattgacgtcaatgggtggagtatttacggtaaactgcccacttggcagtacatcaagtgtatcatatgccaagtacgccccctattgacgtcaatgacggtaaatggcccgcctggcattatgcccagtacatgaccttatgggactttcctacttggcagtacatctacgtattagtcatcgctattaccatggtgatgcggttttggcagtacatcaatgggcgtggatagcggtttgactcacggggatttccaagtctccaccccattgacgtcaatgggagtttgttttggcaccaaaatcaacgggactttccaaaatgtcgtaacaactccgccccattgacgcaaatgggcggtaggcgtgtacggtgggaggtctatataagcagagctctctggctaactagagaacccactgcttactggcttatcgaaattaatacgactcactatagggagacccaagcttatgagctcagggaatatgaaagacaagcatcgctcctacaaaagaaaagggagtccagaaagaggggagaggaagagacactggcagacaactcatcacaggagcaggagccgcagcccgatccgacacagtggggagagaggctcgggctcatatcatcaggaacacccaatcagccacctatcgtcttgcactgcttcgaagacctcagaccaagtgatgaagacgagggagagtacatcggggaaaaaagacaatagaacaaatccatacactgtattcagtcaacacagagcttccaatcctgaagctccagggtggtgtgggttctactggcactctactcgcattgctagagatggtactaattcaatctttaatgaaatgaaacaacagtttcaacagctacaaattgataataaaataggatgggataacactagagaactattgtttaatcaaaagaaaacactagatcaaaaatacagaaatatgttctggcactttagaaataactctgattgtgaaagatgtaattactgggatgatgtgtaccgtagacacttagctaatgtttcctcacagacagaagcagacgagataactgacgaggaaatgctttctgctgctgaaagcatggaagcagatgcctccaatgctactaacttcagcctgctgaagcaggctggagacgtggaggagaaccctggacctatggctttcaatcctcctgtgattagagctttttctcaacctgcttttacttatgtcttcaaatttccatatccacaatggaaagaaaaagaatggctgcttcatgcacttttagctcatggaactgaacaatctatgatacaattaagaaactgcgctcctcatccggatgaagacataatccgtgatgacttgcttatttctttagaagatcgccattttggggctgttctctgcaaggctgtttacatggcaacaactactctcatgtcacacaaacaaaggaatatgtttcctcgttgtgacatcatagttcagtctgagctaggagagaaaaacttacactgccatattatagttgggggagaaggactaagcaagaggaatgctaaatcatcctgtgctcagttctatggtttaatactagctgaaataattcaacgctgcaaatctcttctggctacacgtccttttgaacctgaagaggctgacatatttcacactttaaaaaaggctgagcgagaggcatggggtggagttactggcggcaacatgcaaatccttcaatatagagatcgcagaggagaccttcatgcacaaacagtggatcctcttcgcttcttcaaaaactaccttttacctaaaaatagatgtatttcatcttacaaacctgatgtttgtacttctcctgacaactggttcattttagctgaaaaaacttactctcacactcttattaacgggctgccgcttccagaacattacagaaaaaactaccacgcaaccctagataacgaagtcattccagggcctcaaacaatggcctatggaggacgtggtccgtgggaacatcttccttttacacttcacgaaaacggatactgcactgattgcggtggttaccttcctcatagtgctgacaattctatgtacactgatcgcgcaagcgaaactagcacaggagacatcacaccagacttgggggattcggacggagaagacaccaagcctgagacatcgcaagtggactattgtccacccaagaaacgtcgtctaactgctccagcaagtcctccaaactcacctgcgagctctgtaagtactattactttctttaacacttggcacgcacagccacgtgacgaagatgagctcagggaatatgaaagacaagcatcgctcctacaaaagaaaagggagtccagaaagaggggagaggaagagacactggcagacaactcatcacaggagcaggagccgcagcccgatccgacacagtggggagagaggctcgggctcatatcatcaggaacacccaatcagccacctatcgtcttgcactgcttcgaagacctcagaccaagtgatgaagacgagggagagtacatcggggaaaaaagacaatagaaacccgctgatcagcctcgactgtgccttctagttgccagccatctgttgtttgcccctcccccgtgccttccttgaccctggaaggtgccactcccactgtcctttcctaataaaatgaggaaattgcatcgcattgtctgagtaggtgtcattctattctggggggtggggtggggcaggacagcaagggggaggattgggaagacaatagcaggcatgctggggatgcggtgggctctatgggcccctcctgacgcggtaggaggaggggagggtgccctgcatgtctgccgctgctcttgctcttgccgctgctgaggaggggggcgcatctgccgcagcaccggatgcatctgggaaaagcaaaaaaggggctcgtccctgtttccggaggaatttgcaagcggggtcttgcatgacggggaggcaaacccccgttcgccgcagtccggccggtccgagactcgaaccgggggtcccgcgactcaacccttggaaaataaccctccggctacagggagcgagccacttaatgctttcgctttccagcctaaccgcttacgctgcgcgcggccagtggccaaaaaagctagcgcagcagccgccgcgcctggaaggaagccaaaaggagcactcccccgttgtctgacgtcgcacacctgggttcgacacgcgggcggtaaccgcatggatcacggcggacggccggatacggggctcgaaccccggtcgtccgccatgatacccttgcgaatttatccaccagaccacggaagagtgcccgcttacaggctctccttttgcacggtctagagcgtcaacgattgcgcgcgcctgaccggccagagcgtcccgaccatggagcactttttgccgctgcgcaacatctggaaccgcgtccgcgactttccgcgcgcctccaccaccgccgccggcatcacctggatgtccaggtacatctacggata

SEQ ID NO: 14 - DNA, 11056 bp, synthetic construct
  source 1..11056: mol_type = other DNA
aataaaggcaaatgcttttatttgtacactctcgggtgattatttacccccacccttgccgtctgcgccgtttaaaaatcaaaggggttctgccgcgcatcgctatgcgccactggcagggacacgttgcgatactggtgtttagtgctccacttaaactcaggcacaaccatccgcggcagctcggtgaagttttcactccacaggctgcgcaccatcaccaacgcgtttagcaggtcgggcgccgatatcttgaagtcgcagttggggcctccgccctgcgcgcgcgagttgcgatacacagggttgcagcactggaacactatcagcgccgggtggtgcacgctggccagcacgctcttgtcggagatcagatccgcgtccaggtcctccgcgttgctcagggcgaacggagtcaactttggtagctgccttcccaaaaagggcgcgtgcccaggctttgagttgcactcgcaccgtagtggcatcaaaaggtgaccgtgcccggtctgggcgttaggatacagcgcctgcataaaagccttgatctgcttaaaagccacctgagcctttgcgccttcagagaagaacatgccgcaagacttgccggaaaactgattggccggacaggccgcgtcgtgcacgcagcaccttgcgtcggtgttggagatctgcaccacatttcggccccaccggttcttcacgatcttggccttgctagactgctccttcagcgcgcgctgcccgttttcgctcgtcacatccatttcaatcacgtgctccttatttatcataatgcttccgtgtagacacttaagctcgccttcgatctcagcgcagcggtgcagccacaacgcgcagcccgtgggctcgtgatgcttgtaggtcacctctgcaaacgactgcaggtacgcctgcaggaatcgccccatcatcgtcacaaaggtcttgttgctggtgaaggtcagctgcaacccgcggtgctcctcgttcagccaggtcttgcatacggccgccagagcttccacttggtcaggcagtagtttgaagttcgcctttagatcgttatccacgtggtacttgtccatcagcgcgcgcgcagcctccatgcccttctcccacgcagacacgatcggcacactcagcgggttcatcaccgtaatttcactttccgcttcgctgggctcttcctcttcctcttgcgtccgcataccacgcgccactgggtcgtcttcattcagccgccgcactgtgcgcttacctcctttgccatgcttgattagcaccggtgggttgctgaaacccaccatttgtagcgccacatcttctctttcttcctcgctgtccacgattacctctggtgatggcgggcgctcgggcttgggagaagggcgcttctttttcttcttgggcgcaatggccaaatccgccgccgaggtcgatggccgcgggctgggtgtgcgcggcaccagcgcgtcttgtgatgagtcttcctcgtcctcggactcgatacgccgcctcatccgcttttttgggggcgcccggggaggcggcggcgacggggacggggacgacacgtcctccatggttgggggacgtcgcgccgcaccgcgtccgcgctcgggggtggtttcgcgctgctcctcttcccgactggccatttccttctcctataggcagaaaaagatcatggagtcagtcgagaagaaggacagcctaaccgccccctctgagttcgccaccaccgcctccaccgatgccgccaacgcgcctaccaccttccccgtcgaggcacccccgcttgaggaggaggaagtgattatcgagcaggacccaggttttgtaagcgaagacgacgaggaccgctcagtaccaacagaggataaaaagcaagaccaggacaacgcagaggcaaacgaggaacaagtcgggcggggggacgaaaggcatggcgactacctagatgtgggagacgacgtgctgttgaagcatctgcagcgccagtgcgccattatctgcgacgcgttgcaagagcgcagcgatgtgcccctcgccatagcggatgtcagccttgcctacgaacgccacctattctcaccgcgcgtaccccccaaacgccaagaaaacggcacatgcgagcccaacccgcgcctcaacttctaccccgtatttgccgtgccagaggtgcttgccacctatcacatctttttccaaaactgcaagatacccctatcctgccgtgccaaccgcagccgagcggacaagcagctggccttgcggcagggcgctgtcatacctgatatcgcctcgctcaacgaagtgccaaaaatctttgagggtcttggacgcgacgagaagcgcgcggcaaacgctctgcaacaggaaaacagcgaaaatgaaagtcactctggagtgttggtggaactcgagggtgacaacgcgcgcctagccgtactaaaacgcagcatcgaggtcacccactttgcctacccggcacttaacctaccccccaaggtcatgagcacagtcatgagtgagctgatcgtgcgccgtgcgcagcccctggagagggatgcaaatttgcaagaacaaacagaggagggcctacccgcagttggcgacgagcagctagcgcgctggcttcaaacgcgcgagcctgccgacttggaggagcgacgcaaactaatgatggccgcagtgctcgttaccgtggagcttgagtgcatgcagcggttctttgctgacccggagatgcagcgcaagctagaggaaacattgcactacacctttcgacagggctacgtacgccaggcctgcaagatctccaacgtggagctctgcaacctggtctcctaccttggaattttgcacgaaaaccgccttgggcaaaacgtgcttcattccacgctcaagggcgaggcgcgccgcgactacgtccgcgactgcgtttacttatttctatgctacacctggcagacggccatgggcgtttggcagcagtgcttggaggagtgcaacctcaaggagctgcagaaactgctaaagcaaaacttgaaggacctatggacggccttcaacgagcgctccgtggccgcgcacctggcggacatcattttccccgaacgcctgcttaaaaccctgcaacagggtctgccagacttcaccagtcaaagcatgttgcagaactttaggaactttatcctagagcgctcaggaatcttgcccgccacctgctgtgcacttcctagcgactttgtgcccattaagtaccgcgaatgccctccgccgctttggggccactgctaccttctgcagctagccaactaccttgcctaccactctgacataatggaagacgtgagcggtgacggtctactggagtgtcactgtcgctgcaacctatgcaccccgcaccgctccctggtttgcaattcgcagctgcttaacgaaagtcaaattatcggtacctttgagctgcagggtccctcgcctgacgaaaagtccgcggctccggggttgaaactcactccggggctgtggacgtcggcttaccttcgcaaatttgtacctgaggactaccacgcccacgagattaggttctacgaagaccaatcccgcccgcctaatgcggagcttaccgcctgcgtcattacccagggccacattcttggccaattgcaagccatcaacaaagcccgccaagagtttctgctacgaaagggacggggggtttacttggacccccagtccggcgaggagctcaacccaatccccccgccgccgcagccctatcagcagcagccgcgggcccttgcttcccaggatggcacccaaaaagaagctgcagctgccgccgccacccacggacgaggaggaatactgggacagtcaggcagaggaggttttggacgaggaggaggaggacatgatggaagactgggagagcctagacgaggaagcttccgaggtcgaagaggtgtcagacgaaacaccgtcaccctcggtcgcattcccctcgccggcgccccagaaatcggcaaccggttccagcatggctacaacctccgctcctcaggcgccgccggcactgcccgttcgccgacccaaccgtagatgggacaccactggaaccagggccggtaagtccaagcagccgccgccgttagcccaagagcaacaacagcgccaaggctaccgctcatggcgcgggcacaagaacgccatagttgcttgcttgcaagactgtgggggcaacatctccttcgcccgccgctttcttctctaccatcacggcgtggccttcccccgtaacatcctgcattactaccgtcatctctacagcccatactgcaccggcggcagcggcagcaacagcagcggccacacagaagcaaaggcgaccggatagcaagactctgacaaagcccaagaaatccacagcggcggcagcagcaggaggaggagcgctgcgtctggcgcccaacgaacccgtatcgacccgcgagcttagaaacaggatttttcccactctgtatgctatatttcaacagagcaggggccaagaacaagagctgaaaataaaaaacaggtctctgcgatccctcacccgcagctgcctgtatcacaaaagcgaagatcagcttcggcgcacgctggaagacgcggaggctctcttcagtaaatactgcgcgctgactcttaaggactagtttcgcgccctttctcaaatttaagcgcgaaaactacgtcatctccagcggccacacccggcgccagcacctgttgtcagcgccattttttagggcggagtaacttgtatgtgttgggaattgtagttttcttaaaatgggaagtgacgtaacgtgggaaaacggaagtgacgatttgaggaagttgtgggttttttggctttcgtttctgggcgtaggttcgcgtgcggttttctgggtgttttttgtggactttaaccgttacgtcattttttagtcctatatatactcgctctgcacttggcccttttttacactgtgactgattgagctggtgccgtgtcgagtggtgtttttttaataggttttcttttttactggtaaggctgactgttatgattcgctgcttgaggctgaaggtggagggcgctctggagcagatttttacaatggccggacttaatattcgggatttgcttagagatatattgagaaggtggcgagatgagaattatttgggcatggttgaaggtgctggaatgtttatagaggagattcaccctgaagggtttagcctttacgtccacttggacgtgagggccgtttgccttttggaagccattgtgcaacatcttacaaatgccattatctgttctttggctgtagagtttgaccacgccaccggaggggagcgcgttcacttaatagatcttcattttgaggttttggataatcttttggaataaaaaaaaaaaacatggttcttccagctcttcccgctcctcccgtgtgtgactcgcagaacgaatgtgtaggttggctgggtgtggcttattctgcggtggtggatgttatcagggcagcggcgcatgaaggagtttacatagaacccgaagccagggggcgcctggatgctttgagagagtggatatactacaactactacacagagcgatctaagcggcgagaccggagacgcagatctgtttgtcacgcccgcacctggttttgcttcaggaaatatgactacgtccggcgttccatttggcatgacactacgaccaacacgatctcggttgtctcggcgcactccgtacagtagggatcgtctacctccttttgagacagaaacccgcgctaccatactggaggatcatccgctgctgcccgaatgtaacactttgacaatgcacaacgtgagttacgtgcgaggtcttccctgcagtgtgggatttacgctgattcaggaatgggttgttccctgggatatggttctaacgcgggaggagcttgtaatcctgaggaagtgtatgcacgtgtgcctgtgttgtgccaacattgatatcatgacgagcatgatgatccatggttacgagtcctgggctctccactgtcattgttccagtcccggttccctgcagtgtatagccggcgggcaggttttggccagctggtttaggatggtggtggatggcgccatgtttaatcagaggtttatatggtaccgggaggtggtgaattacaacatgccaaaagaggtaatgtttatgtccagcgtgtttatgaggggtcgccacttaatctacctgcgcttgtggtatgatggccacgtgggttctgtggtccccgccatgagctttggatacagcgccttgcactgtgggattttgaacaatattgtggtgctgtgctgcagttactgtgctgatttaagtgagatcagggtgcgctgctgtgcccggaggacaaggcgccttatgctgcgggcggtgcgaatcatcgctgaggagaccactgccatgttgtattcctgcaggacggagcggcggcggcagcagtttattcgcgcgctgctgcagcaccaccgccctatcctgatgcacgattatgactctacccccatgtaggcgtggacttctccttcgccgcccgttaagcaaccgcaagttggacagcagcctgtggctcagcagctggacagcgacatgaacttaagtgagctgcccggggagtttattaatatcactgatgagcgtttggctcgacaggaaaccgtgtggaatataacacctaagaatatgtctgttacccatgatatgatgctttttaaggccagccggggagaaaggactgtgtactctgtgtgttgggagggaggtggcaggttgaatactagggttctgtgagtttgattaaggtacggtgatctgtataagctatgtggtggtggggctatactactgaatgaaaaatgacttgaaattttctgcaattgaaaaataaacacgttgaaacataacacaaacgattctttattcttgggcaatgtatgaaaaagtgtaagaggatgtggcaaatatttcattaatgtagttgtggccagaccagtcccatgaaaatgacatagagtatgcacttggagttgtgtctcctgtttcctgtgtaccgtttagtgtaatggttagtgttacaggtttagttttgtctccgtttaagtaaacttgactgacaatgttacttttggcagttttaccgtgagattttggataagctgataggttaggcataaatccaacagcgtttgtataggctgtcgacattgattattgactagttattaatagtaatcaattacggggtcattagttcatagcccatatatggagttccgcgttacataacttacggtaaatggcccgcctggctgaccgcccaacgacccccgcccattgacgtcaataatgacgtatgttcccatagtaacgccaatagggactttccattgacgtcaatgggtggagtatttacggtaaactgcccacttggcagtacatcaagtgtatcatatgccaagtacgccccctattgacgtcaatgacggtaaatggcccgcctggcattatgcccagtacatgaccttatgggactttcctacttggcagtacatctacgtattagtcatcgctattaccatggtgatgcggttttggcagtacatcaatgggcgtggatagcggtttgactcacggggatttccaagtctccaccccattgacgtcaatgggagtttgttttggcaccaaaatcaacgggactttccaaaatgtcgtaacaactccgccccattgacgcaaatgggcggtaggcgtgtacggtgggaggtctatataagcagagctctctggctaactagagaacccactgcttactggcttatcgaaattaatacgactcactatagggagacccaagcttatgagctcagggaatatgaaagacaagcatcgctcctacaaaagaaaagggagtccagaaagaggggagaggaagagacactggcagacaactcatcacaggagcaggagccgcagcccgatccgacacagtggggagagaggctcgggctcatatcatcaggaacacccaatcagccacctatcgtcttgcactgcttcgaagacctcagaccaagtgatgaagacgagggagagtacatcggggaaaaaagacaatagaacaaatccatacactgtattcagtcaacacagagcttccaatcctgaagctccagggtggtgtgggttctactggcactctactcgcattgctagagatggtactaattcaatctttaatgaaatgaaacaacagtttcaacagctacaaattgataataaaataggatgggataacactagagaactattgtttaatcaaaagaaaacactagatcaaaaatacagaaatatgttctggcactttagaaataactctgattgtgaaagatgtaattactgggatgatgtgtaccgtagacacttagctaatgtttcctcacagacagaagcagacgagataactgacgaggaaatgctttctgctgctgaaagcatggaagcagatgcctccaatgctactaacttcagcctgctgaagcaggctggagacgtggaggagaaccctggacctatggctttcaatcctcctgtgattagagctttttctcaacctgcttttacttatgtcttcaaatttccatatccacaatggaaagaaaaagaatggctgcttcatgcacttttagctcatggaactgaacaatctatgatacaattaagaaactgcgctcctcatccggatgaagacataatccgtgatgacttgcttatttctttagaagatcgccattttggggctgttctctgcaaggctgtttacatggcaacaactactctcatgtcacacaaacaaaggaatatgtttcctcgttgtgacatcatagttcagtctgagctaggagagaaaaacttacactgccatattatagttgggggagaaggactaagcaagaggaatgctaaatcatcctgtgctcagttctatggtttaatactagctgaaataattcaacgctgcaaatctcttctggctacacgtccttttgaacctgaagaggctgacatatttcacactttaaaaaaggctgagcgagaggcatggggtggagttactggcggcaacatgcaaatccttcaatatagagatcgcagaggagaccttcatgcacaaacagtggatcctcttcgcttcttcaaaaactaccttttacctaaaaatagatgtatttcatcttacaaacctgatgtttgtacttctcctgacaactggttcattttagctgaaaaaacttactctcacactcttattaacgggctgccgcttccagaacattacagaaaaaactaccacgcaaccctagataacgaagtcattccagggcctcaaacaatggcctatggaggacgtggtccgtgggaacatcttccttttacacttcacgaaaacggatactgcactgattgcggtggttaccttcctcatagtgctgacaattctatgtacactgatcgcgcaagcgaaactagcacaggagacatcacaccagacttgggggattcggacggagaagacaccaagcctgagacatcgcaagtggactattgtccacccaagaaacgtcgtctaactgctccagcaagtcctccaaactcacctgcgagctctgtaagtactattactttctttaacacttggcacgcacagccacgtgacgaagatgagctcagggaatatgaaagacaagcatcgctcctacaaaagaaaagggagtccagaaagaggggagaggaagagacactggcagacaactcatcacaggagcaggagccgcagcccgatccgacacagtggggagagaggctcgggctcatatcatcaggaacacccaatcagccacctatcgtcttgcactgcttcgaagacctcagaccaagtgatgaagacgagggagagtacatcggggaaaaaagacaatagaaacccgctgatcagcctcgactgtgccttctagttgccagccatctgttgtttgcccctcccccgtgccttccttgaccctggaaggtgccactcccactgtcctttcctaataaaatgaggaaattgcatcgcattgtctgagtaggtgtcattctattctggggggtggggtggggcaggacagcaagggggaggattgggaagacaatagcaggcatgctggggatgcggtgggctctatgggcccctcctgacgcggtaggaggaggggagggtgccctgcatgtctgccgctgctcttgctcttgccgctgctgaggaggggggcgcatctgccgcagcaccggatgcatctgggaaaagcaaaaaaggggctcgtccctgtttccggaggaatttgcaagcggggtcttgcatgacggggaggcaaacccccgttcgccgcagtccggccggtccgagactcgaaccgggggtcccgcgactcaacccttggaaaataaccctccggctacagggagcgagccacttaatgctttcgctttccagcctaaccgcttacgctgcgcgcggccagtggccaaaaaagctagcgcagcagccgccgcgcctggaaggaagccaaaaggagcactcccccgttgtctgacgtcgcacacctgggttcgacacgcgggcggtaaccgcatggatcacggcggacggccggatacggggctcgaaccccggtcgtccgccatgatacccttgcgaatttatccaccagaccacggaagagtgcccgcttacaggctctccttttgcacggtctagagcgtcaacgattgcgcgcgcctgaccggccagagcgtcccgaccatggagcactttttgccgctgcgcaacatctggaaccgcgtccgcgactttccgcgcgcctccaccaccgccgccggcatcacctggatgtccaggtacatctacggata

SEQ ID NO: 15 - DNA, 594 bp, synthetic construct
  source 1..594: mol_type = other DNA
ctggcgactcagagtcagttccagaccctcaacctctcggagaacctccagcagcgccctctggtgtgggacctaatacaatggctgcaggcggtggcgcaccaatggcagacaataacgaaggcgccgacggagtgggtagttcctcgggaaattggcattgcgattccacatggctgggcgacagagtcatcaccaccagcacccgaacctgggccctgcccacctacaacaaccacctctacaagcaaatctccaacgggacatcgggaggagccaccaacgacaacacctacttcggctacagcaccccctgggggtattttgactttaacagattccactgccacttttcaccacgtgactggcagcgactcatcaacaacaactggggattccggcccaagagactcagcttcaagctcttcaacatccaggtcaaggaggtcacgcagaatgaaggcaccaagaccatcgccaataacctcaccagcaccatccaggtgtttacggactcggagtaccagctgccgtacgttctcggctctgcccaccagggctgcctgcctccgttcccggcggacgtgttcatga

SEQ ID NO: 16 - DNA, 8831 bp, synthetic construct
  source 1..8831: mol_type = other DNA
ttaaaaatcaaaggggttctgccgcgcatcgctatgcgccactggcagggacacgttgcgatactggtgtttagtgctccacttaaactcaggcacaaccatccgcggcagctcggtgaagttttcactccacaggctgcgcaccatcaccaacgcgtttagcaggtcgggcgccgatatcttgaagtcgcagttggggcctccgccctgcgcgcgcgagttgcgatacacagggttgcagcactggaacactatcagcgccgggtggtgcacgctggccagcacgctcttgtcggagatcagatccgcgtccaggtcctccgcgttgctcagggcgaacggagtcaactttggtagctgccttcccaaaaagggcgcgtgcccaggctttgagttgcactcgcaccgtagtggcatcaaaaggtgaccgtgcccggtctgggcgttaggatacagcgcctgcataaaagccttgatctgcttaaaagccacctgagcctttgcgccttcagagaagaacatgccgcaagacttgccggaaaactgattggccggacaggccgcgtcgtgcacgcagcaccttgcgtcggtgttggagatctgcaccacatttcggccccaccggttcttcacgatcttggccttgctagactgctccttcagcgcgcgctgcccgttttcgctcgtcacatccatttcaatcacgtgctccttatttatcataatgcttccgtgtagacacttaagctcgccttcgatctcagcgcagcggtgcagccacaacgcgcagcccgtgggctcgtgatgcttgtaggtcacctctgcaaacgactgcaggtacgcctgcaggaatcgccccatcatcgtcacaaaggtcttgttgctggtgaaggtcagctgcaacccgcggtgctcctcgttcagccaggtcttgcatacggccgccagagcttccacttggtcaggcagtagtttgaagttcgcctttagatcgttatccacgtggtacttgtccatcagcgcgcgcgcagcctccatgcccttctcccacgcagacacgatcggcacactcagcgggttcatcaccgtaatttcactttccgcttcgctgggctcttcctcttcctcttgcgtccgcataccacgcgccactgggtcgtcttcattcagccgccgcactgtgcgcttacctcctttgccatgcttgattagcaccggtgggttgctgaaacccaccatttgtagcgccacatcttctctttcttcctcgctgtccacgattacctctggtgatggcgggcgctcgggcttgggagaagggcgcttctttttcttcttgggcgcaatggccaaatccgccgccgaggtcgatggccgcgggctgggtgtgcgcggcaccagcgcgtcttgtgatgagtcttcctcgtcctcggactcgatacgccgcctcatccgcttttttgggggcgcccggggaggcggcggcgacggggacggggacgacacgtcctccatggttgggggacgtcgcgccgcaccgcgtccgcgctcgggggtggtttcgcgctgctcctcttcccgactggccatttccttctcctataggcagaaaaagatcatggagtcagtcgagaagaaggacagcctaaccgccccctctgagttcgccaccaccgcctccaccgatgccgccaacgcgcctaccaccttccccgtcgaggcacccccgcttgaggaggaggaagtgattatcgagcaggacccaggttttgtaagcgaagacgacgaggaccgctcagtaccaacagaggataaaaagcaagaccaggacaacgcagaggcaaacgaggaacaagtcgggcggggggacgaaaggcatggcgactacctagatgtgggagacgacgtgctgttgaagcatctgcagcgccagtgcgccattatctgcgacgcgttgcaagagcgcagcgatgtgcccctcgccatagcggatgtcagccttgcctacgaacgccacctattctcaccgcgcgtaccccccaaacgccaagaaaacggcacatgcgagcccaacccgcgcctcaacttctaccccgtatttgccgtgccagaggtgcttgccacctatcacatctttttccaaaactgcaagatacccctatcctgccgtgccaaccgcagccgagcggacaagcagctggccttgcggcagggcgctgtcatacctgatatcgcctcgctcaacgaagtgccaaaaatctttgagggtcttggacgcgacgagaagcgcgcggcaaacgctctgcaacaggaaaacagcgaaaatgaaagtcactctggagtgttggtggaactcgagggtgacaacgcgcgcctagccgtactaaaacgcagcatcgaggtcacccactttgcctacccggcacttaacctaccccccaaggtcatgagcacagtcatgagtgagctgatcgtgcgccgtgcgcagcccctggagagggatgcaaatttgcaagaacaaacagaggagggcctacccgcagttggcgacgagcagctagcgcgctggcttcaaacgcgcgagcctgccgacttggaggagcgacgcaaactaatgatggccgcagtgctcgttaccgtggagcttgagtgcatgcagcggttctttgctgacccggagatgcagcgcaagctagaggaaacattgcactacacctttcgacagggctacgtacgccaggcctgcaagatctccaacgtggagctctgcaacctggtctcctaccttggaattttgcacgaaaaccgccttgggcaaaacgtgcttcattccacgctcaagggcgaggcgcgccgcgactacgtccgcgactgcgtttacttatttctatgctacacctggcagacggccatgggcgtttggcagcagtgcttggaggagtgcaacctcaaggagctgcagaaactgctaaagcaaaacttgaaggacctatggacggccttcaacgagcgctccgtggccgcgcacctggcggacatcattttccccgaacgcctgcttaaaaccctgcaacagggtctgccagacttcaccagtcaaagcatgttgcagaactttaggaactttatcctagagcgctcaggaatcttgcccgccacctgctgtgcacttcctagcgactttgtgcccattaagtaccgcgaatgccctccgccgctttggggccactgctaccttctgcagctagccaactaccttgcctaccactctgacataatggaagacgtgagcggtgacggtctactggagtgtcactgtcgctgcaacctatgcaccccgcaccgctccctggtttgcaattcgcagctgcttaacgaaagtcaaattatcggtacctttgagctgcagggtccctcgcctgacgaaaagtccgcggctccggggttgaaactcactccggggctgtggacgtcggcttaccttcgcaaatttgtacctgaggactaccacgcccacgagattaggttctacgaagaccaatcccgcccgcctaatgcggagcttaccgcctgcgtcattacccagggccacattcttggccaattgcaagccatcaacaaagcccgccaagagtttctgctacgaaagggacggggggtttacttggacccccagtccggcgaggagctcaacccaatccccccgccgccgcagccctatcagcagcagccgcgggcccttgcttcccaggatggcacccaaaaagaagctgcagctgccgccgccacccacggacgaggaggaatactgggacagtcaggcagaggaggttttggacgaggaggaggaggacatgatggaagactgggagagcctagacgaggaagcttccgaggtcgaagaggtgtcagacgaaacaccgtcaccctcggtcgcattcccctcgccggcgccccagaaatcggcaaccggttccagcatggctacaacctccgctcctcaggcgccgccggcactgcccgttcgccgacccaaccgtagatgggacaccactggaaccagggccggtaagtccaagcagccgccgccgttagcccaagagcaacaacagcgccaaggctaccgctcatggcgcgggcacaagaacgccatagttgcttgcttgcaagactgtgggggcaacatctccttcgcccgccgctttcttctctaccatcacggcgtggccttcccccgtaacatcctgcattactaccgtcatctctacagcccatactgcaccggcggcagcggcagcaacagcagcggccacacagaagcaaaggcgaccggatagcaagactctgacaaagcccaagaaatccacagcggcggcagcagcaggaggaggagcgctgcgtctggcgcccaacgaacccgtatcgacccgcgagcttagaaacaggatttttcccactctgtatgctatatttcaacagagcaggggccaagaacaagagctgaaaataaaaaacaggtctctgcgatccctcacccgcagctgcctgtatcacaaaagcgaagatcagcttcggcgcacgctggaagacgcggaggctctcttcagtaaatactgcgcgctgactcttaaggactagtttcgcgccctttctcaaatttaagcgcgaaaactacgtcatctccagcggccacacccggcgccagcacctgttgtcagcgccattttttagggcggagtaacttgtatgtgttgggaattgtagttttcttaaaatgggaagtgacgtaacgtgggaaaacggaagtgacgatttgaggaagttgtgggttttttggctttcgtttctgggcgtaggttcgcgtgcggttttctgggtgttttttgtggactttaaccgttacgtcattttttagtcctatatatactcgctctgcacttggcccttttttacactgtgactgattgagctggtgccgtgtcgagtggtgtttttttaataggttttcttttttactggtaaggctgactgttatgactacgtccggcgttccatttggcatgacactacgaccaacacgatctcggttgtctcggcgcactccgtacagtagggatcgtctacctccttttgagacagaaacccgcgctaccatactggaggatcatccgctgctgcccgaatgtaacactttgacaatgcacaacgtgagttacgtgcgaggtcttccctgcagtgtgggatttacgctgattcaggaatgggttgttccctgggatatggttctaacgcgggaggagcttgtaatcctgaggaagtgtatgcacgtgtgcctgtgttgtgccaacattgatatcatgacgagcatgatgatccatggttacgagtcctgggctctccactgtcattgttccagtcccggttccctgcagtgtatagccggcgggcaggttttggccagctggtttaggatggtggtggatggcgccatgtttaatcagaggtttatatggtaccgggaggtggtgaattacaacatgccaaaagaggtaatgtttatgtccagcgtgtttatgaggggtcgccacttaatctacctgcgcttgtggtatgatggccacgtgggttctgtggtccccgccatgagctttggatacagcgccttgcactgtgggattttgaacaatattgtggtgctgtgctgcagttactgtgctgatttaagtgagatcagggtgcgctgctgtgcccggaggacaaggcgccttatgctgcgggcggtgcgaatcatcgctgaggagaccactgccatgttgtattcctgcaggacggagcggcggcggcagcagtttattcgcgcgctgctgcagcaccaccgccctatcctgatgcacgattatgactctacccccatgtaggcgtggacttctccttcgccgcccgttaagcaaccgcaagttggacagcagcctgtggctcagcagctggacagcgacatgaacttaagtgagctgcccggggagtttattaatatcactgatgagcgtttggctcgacaggaaaccgtgtggaatataacacctaagaatatgtctgttacccatgatatgatgctttttaaggccagccggggagaaaggactgtgtactctgtgtgttgggagggaggtggcaggttgaatactagggttctgtgagtttgattaaggtacggtgatctgtataagctatgtggtggtggggctatactactgaatgaaaaatgacttgaaattttctgcaattgaaaaataaacacgttgaaacataacacaaacgattctttattcttgggcaatgtatgaaaaagtgtaagaggatgtggcaaatatttcattaatgtagttgtggccagaccagtcccatgaaaatgacatagagtatgcacttggagttgtgtctcctgtttcctgtgtaccgtttagtgtaatggttagtgttacaggtttagttttgtctccgtttaagtaaacttgactgacaatgttacttttggcagttttaccgtgagattttggataagctgataggttaggcataaatccaacagcgtttgtataggctgtcgacattgattattgactagttattaatagtaatcaattacggggtcattagttcatagcccatatatggagttccgcgttacataacttacggtaaatggcccgcctggctgaccgcccaacgacccccgcccattgacgtcaataatgacgtatgttcccatagtaacgccaatagggactttccattgacgtcaatgggtggagtatttacggtaaactgcccacttggcagtacatcaagtgtatcatatgccaagtacgccccctattgacgtcaatgacggtaaatggcccgcctggcattatgcccagtacatgaccttatgggactttcctacttggcagtacatctacgtattagtcatcgctattaccatggtgatgcggttttggcagtacatcaatgggcgtggatagcggtttgactcacggggatttccaagtctccaccccattgacgtcaatgggagtttgttttggcaccaaaatcaacgggactttccaaaatgtcgtaacaactccgccccattgacgcaaatgggcggtaggcgtgtacggtgggaggtctatataagcagagctctctggctaactagagaacccactgcttactggcttatcgaaattaatacgactcactatagggagacccaagctgctggcgactcagagtcagttccagaccctcaacctctcggagaacctccagcagcgccctctggtgtgggacctaatacaatggctgcaggcggtggcgcaccaatggcagacaataacgaaggcgccgacggagtgggtagttcctcgggaaattggcattgcgattccacatggctgggcgacagagtcatcaccaccagcacccgaacctgggccctgcccacctacaacaaccacctctacaagcaaatctccaacgggacatcgggaggagccaccaacgacaacacctacttcggctacagcaccccctgggggtattttgactttaacagattccactgccacttttcaccacgtgactggcagcgactcatcaacaacaactggggattccggcccaagagactcagcttcaagctcttcaacatccaggtcaaggaggtcacgcagaatgaaggcaccaagaccatcgccaataacctcaccagcaccatccaggtgtttacggactcggagtaccagctgccgtacgttctcggctctgcccaccagggctgcctgcctccgttcccggcggacgtgttcatgaaaacccgctgatcagcctcgactgtgccttctagttgccagccatctgttgtttgcccctcccccgtgccttccttgaccctggaaggtgccactcccactgtcctttcctaataaaatgaggaaattgcatcgcattgtctgagtaggtgtcattctattctggggggtggggtggggcaggacagcaagggggaggattgggaagacaatagcaggcatgctggggatgcggtgggctctatgggcccctcctgacgcggtaggaggaggggagggtgccctgcatgtctgccgctgctcttgctcttgccgctgctgaggaggggggcgcatctgccgcagcaccggatgcatctgggaaaagcaaaaaaggggctcgtccctgtttccggaggaatttgcaagcggggtcttgcatgacggggaggcaaacccccgttcgccgcagtccggccggtccgagactcgaaccgggggtcccgcgactcaacccttggaaaataaccctccggctacagggagcgagccacttaatgctttcgctttccagcctaaccgcttacgctgcgcgcggccagtggccaaaaaagctagcgcagcagccgccgcgcctggaaggaagccaaaaggagcactcccccgttgtctgacgtcgcacacctgggttcgacacgcgggcggtaaccgcatggatcacggcggacggccggatacggggctcgaaccccggtcgtccgccatgatacccttgcgaatttatccaccagaccacggaagagtgcccgcttacaggctctccttttgcacggtctagagcgtcaacgattgcgcgcgcctgaccggccagagcgtcccgaccatggagcactttttgccgctgcgcaacatctggaaccgcgtccgcgactttccgcgcgcctccaccaccgccgccggcatcacctggatgtccaggtacatctacggata

SEQ ID NO: 17 - DNA, 8902 bp, synthetic construct
  source 1..8902: mol_type = other DNA
aataaaggcaaatgcttttatttgtacactctcgggtgattatttacccccacccttgccgtctgcgccgtttaaaaatcaaaggggttctgccgcgcatcgctatgcgccactggcagggacacgttgcgatactggtgtttagtgctccacttaaactcaggcacaaccatccgcggcagctcggtgaagttttcactccacaggctgcgcaccatcaccaacgcgtttagcaggtcgggcgccgatatcttgaagtcgcagttggggcctccgccctgcgcgcgcgagttgcgatacacagggttgcagcactggaacactatcagcgccgggtggtgcacgctggccagcacgctcttgtcggagatcagatccgcgtccaggtcctccgcgttgctcagggcgaacggagtcaactttggtagctgccttcccaaaaagggcgcgtgcccaggctttgagttgcactcgcaccgtagtggcatcaaaaggtgaccgtgcccggtctgggcgttaggatacagcgcctgcataaaagccttgatctgcttaaaagccacctgagcctttgcgccttcagagaagaacatgccgcaagacttgccggaaaactgattggccggacaggccgcgtcgtgcacgcagcaccttgcgtcggtgttggagatctgcaccacatttcggccccaccggttcttcacgatcttggccttgctagactgctccttcagcgcgcgctgcccgttttcgctcgtcacatccatttcaatcacgtgctccttatttatcataatgcttccgtgtagacacttaagctcgccttcgatctcagcgcagcggtgcagccacaacgcgcagcccgtgggctcgtgatgcttgtaggtcacctctgcaaacgactgcaggtacgcctgcaggaatcgccccatcatcgtcacaaaggtcttgttgctggtgaaggtcagctgcaacccgcggtgctcctcgttcagccaggtcttgcatacggccgccagagcttccacttggtcaggcagtagtttgaagttcgcctttagatcgttatccacgtggtacttgtccatcagcgcgcgcgcagcctccatgcccttctcccacgcagacacgatcggcacactcagcgggttcatcaccgtaatttcactttccgcttcgctgggctcttcctcttcctcttgcgtccgcataccacgcgccactgggtcgtcttcattcagccgccgcactgtgcgcttacctcctttgccatgcttgattagcaccggtgggttgctgaaacccaccatttgtagcgccacatcttctctttcttcctcgctgtccacgattacctctggtgatggcgggcgctcgggcttgggagaagggcgcttctttttcttcttgggcgcaatggccaaatccgccgccgaggtcgatggccgcgggctgggtgtgcgcggcaccagcgcgtcttgtgatgagtcttcctcgtcctcggactcgatacgccgcctcatccgcttttttgggggcgcccggggaggcggcggcgacggggacggggacgacacgtcctccatggttgggggacgtcgcgccgcaccgcgtccgcgctcgggggtggtttcgcgctgctcctcttcccgactggccatttccttctcctataggcagaaaaagatcatggagtcagtcgagaagaaggacagcctaaccgccccctctgagttcgccaccaccgcctccaccgatgccgccaacgcgcctaccaccttccccgtcgaggcacccccgcttgaggaggaggaagtgattatcgagcaggacccaggttttgtaagcgaagacgacgaggaccgctcagtaccaacagaggataaaaagcaagaccaggacaacgcagaggcaaacgaggaacaagtcgggcggggggacgaaaggcatggcgactacctagatgtgggagacgacgtgctgttgaagcatctgcagcgccagtgcgccattatctgcgacgcgttgcaagagcgcagcgatgtgcccctcgccatagcggatgtcagccttgcctacgaacgccacctattctcaccgcgcgtaccccccaaacgccaagaaaacggcacatgcgagcccaacccgcgcctcaacttctaccccgtatttgccgtgccagaggtgcttgccacctatcacatctttttccaaaactgcaagatacccctatcctgccgtgccaaccgcagccgagcggacaagcagctggccttgcggcagggcgctgtcatacctgatatcgcctcgctcaacgaagtgccaaaaatctttgagggtcttggacgcgacgagaagcgcgcggcaaacgctctgcaacaggaaaacagcgaaaatgaaagtcactctggagtgttggtggaactcgagggtgacaacgcgcgcctagccgtactaaaacgcagcatcgaggtcacccactttgcctacccggcacttaacctaccccccaaggtcatgagcacagtcatgagtgagctgatcgtgcgccgtgcgcagcccctggagagggatgcaaatttgcaagaacaaacagaggagggcctacccgcagttggcgacgagcagctagcgcgctggcttcaaacgcgcgagcctgccgacttggaggagcgacgcaaactaatgatggccgcagtgctcgttaccgtggagcttgagtgcatgcagcggttctttgctgacccggagatgcagcgcaagctagaggaaacattgcactacacctttcgacagggctacgtacgccaggcctgcaagatctccaacgtggagctctgcaacctggtctcctaccttggaattttgcacgaaaaccgccttgggcaaaacgtgcttcattccacgctcaagggcgaggcgcgccgcgactacgtccgcgactgcgtttacttatttctatgctacacctggcagacggccatgggcgtttggcagcagtgcttggaggagtgcaacctcaaggagctgcagaaactgctaaagcaaaacttgaaggacctatggacggccttcaacgagcgctccgtggccgcgcacctggcggacatcattttccccgaacgcctgcttaaaaccctgcaacagggtctgccagacttcaccagtcaaagcatgttgcagaactttaggaactttatcctagagcgctcaggaatcttgcccgccacctgctgtgcacttcctagcgactttgtgcccattaagtaccgcgaatgccctccgccgctttggggccactgctaccttctgcagctagccaactaccttgcctaccactctgacataatggaagacgtgagcggtgacggtctactggagtgtcactgtcgctgcaacctatgcaccccgcaccgctccctggtttgcaattcgcagctgcttaacgaaagtcaaattatcggtacctttgagctgcagggtccctcgcctgacgaaaagtccgcggctccggggttgaaactcactccggggctgtggacgtcggcttaccttcgcaaatttgtacctgaggactaccacgcccacgagattaggttctacgaagaccaatcccgcccgcctaatgcggagcttaccgcctgcgtcattacccagggccacattcttggccaattgcaagccatcaacaaagcccgccaagagtttctgctacgaaagggacggggggtttacttggacccccagtccggcgaggagctcaacccaatccccccgccgccgcagccctatcagcagcagccgcgggcccttgcttcccaggatggcacccaaaaagaagctgcagctgccgccgccacccacggacgaggaggaatactgggacagtcaggcagaggaggttttggacgaggaggaggaggacatgatggaagactgggagagcctagacgaggaagcttccgaggtcgaagaggtgtcagacgaaacaccgtcaccctcggtcgcattcccctcgccggcgccccagaaatcggcaaccggttccagcatggctacaacctccgctcctcaggcgccgccggcactgcccgttcgccgacccaaccgtagatgggacaccactggaaccagggccggtaagtccaagcagccgccgccgttagcccaagagcaacaacagcgccaaggctaccgctcatggcgcgggcacaagaacgccatagttgcttgcttgcaagactgtgggggcaacatctccttcgcccgccgctttcttctctaccatcacggcgtggccttcccccgtaacatcctgcattactaccgtcatctctacagcccatactgcaccggcggcagcggcagcaacagcagcggccacacagaagcaaaggcgaccggatagcaagactctgacaaagcccaagaaatccacagcggcggcagcagcaggaggaggagcgctgcgtctggcgcccaacgaacccgtatcgacccgcgagcttagaaacaggatttttcccactctgtatgctatatttcaacagagcaggggccaagaacaagagctgaaaataaaaaacaggtctctgcgatccctcacccgcagctgcctgtatcacaaaagcgaagatcagcttcggcgcacgctggaagacgcggaggctctcttcagtaaatactgcgcgctgactcttaaggactagtttcgcgccctttctcaaatttaagcgcgaaaactacgtcatctccagcggccacacccggcgccagcacctgttgtcagcgccattttttagggcggagtaacttgtatgtgttgggaattgtagttttcttaaaatgggaagtgacgtaacgtgggaaaacggaagtgacgatttgaggaagttgtgggttttttggctttcgtttctgggcgtaggttcgcgtgcggttttctgggtgttttttgtggactttaaccgttacgtcattttttagtcctatatatactcgctctgcacttggcccttttttacactgtgactgattgagctggtgccgtgtcgagtggtgtttttttaataggttttcttttttactggtaaggctgactgttatgactacgtccggcgttccatttggcatgacactacgaccaacacgatctcggttgtctcggcgcactccgtacagtagggatcgtctacctccttttgagacagaaacccgcgctaccatactggaggatcatccgctgctgcccgaatgtaacactttgacaatgcacaacgtgagttacgtgcgaggtcttccctgcagtgtgggatttacgctgattcaggaatgggttgttccctgggatatggttctaacgcgggaggagcttgtaatcctgaggaagtgtatgcacgtgtgcctgtgttgtgccaacattgatatcatgacgagcatgatgatccatggttacgagtcctgggctctccactgtcattgttccagtcccggttccctgcagtgtatagccggcgggcaggttttggccagctggtttaggatggtggtggatggcgccatgtttaatcagaggtttatatggtaccgggaggtggtgaattacaacatgccaaaagaggtaatgtttatgtccagcgtgtttatgaggggtcgccacttaatctacctgcgcttgtggtatgatggccacgtgggttctgtggtccccgccatgagctttggatacagcgccttgcactgtgggattttgaacaatattgtggtgctgtgctgcagttactgtgctgatttaagtgagatcagggtgcgctgctgtgcccggaggacaaggcgccttatgctgcgggcggtgcgaatcatcgctgaggagaccactgccatgttgtattcctgcaggacggagcggcggcggcagcagtttattcgcgcgctgctgcagcaccaccgccctatcctgatgcacgattatgactctacccccatgtaggcgtggacttctccttcgccgcccgttaagcaaccgcaagttggacagcagcctgtggctcagcagctggacagcgacatgaacttaagtgagctgcccggggagtttattaatatcactgatgagcgtttggctcgacaggaaaccgtgtggaatataacacctaagaatatgtctgttacccatgatatgatgctttttaaggccagccggggagaaaggactgtgtactctgtgtgttgggagggaggtggcaggttgaatactagggttctgtgagtttgattaaggtacggtgatctgtataagctatgtggtggtggggctatactactgaatgaaaaatgacttgaaattttctgcaattgaaaaataaacacgttgaaacataacacaaacgattctttattcttgggcaatgtatgaaaaagtgtaagaggatgtggcaaatatttcattaatgtagttgtggccagaccagtcccatgaaaatgacatagagtatgcacttggagttgtgtctcctgtttcctgtgtaccgtttagtgtaatggttagtgttacaggtttagttttgtctccgtttaagtaaacttgactgacaatgttacttttggcagttttaccgtgagattttggataagctgataggttaggcataaatccaacagcgtttgtataggctgtcgacattgattattgactagttattaatagtaatcaattacggggtcattagttcatagcccatatatggagttccgcgttacataacttacggtaaatggcccgcctggctgaccgcccaacgacccccgcccattgacgtcaataatgacgtatgttcccatagtaacgccaatagggactttccattgacgtcaatgggtggagtatttacggtaaactgcccacttggcagtacatcaagtgtatcatatgccaagtacgccccctattgacgtcaatgacggtaaatggcccgcctggcattatgcccagtacatgaccttatgggactttcctacttggcagtacatctacgtattagtcatcgctattaccatggtgatgcggttttggcagtacatcaatgggcgtggatagcggtttgactcacggggatttccaagtctccaccccattgacgtcaatgggagtttgttttggcaccaaaatcaacgggactttccaaaatgtcgtaacaactccgccccattgacgcaaatgggcggtaggcgtgtacggtgggaggtctatataagcagagctctctggctaactagagaacccactgcttactggcttatcgaaattaatacgactcactatagggagacccaagctgctggcgactcagagtcagttccagaccctcaacctctcggagaacctccagcagcgccctctggtgtgggacctaatacaatggctgcaggcggtggcgcaccaatggcagacaataacgaaggcgccgacggagtgggtagttcctcgggaaattggcattgcgattccacatggctgggcgacagagtcatcaccaccagcacccgaacctgggccctgcccacctacaacaaccacctctacaagcaaatctccaacgggacatcgggaggagccaccaacgacaacacctacttcggctacagcaccccctgggggtattttgactttaacagattccactgccacttttcaccacgtgactggcagcgactcatcaacaacaactggggattccggcccaagagactcagcttcaagctcttcaacatccaggtcaaggaggtcacgcagaatgaaggcaccaagaccatcgccaataacctcaccagcaccatccaggtgtttacggactcggagtaccagctgccgtacgttctcggctctgcccaccagggctgcctgcctccgttcccggcggacgtgttcatgaaaacccgctgatcagcctcgactgtgccttctagttgccagccatctgttgtttgcccctcccccgtgccttccttgaccctggaaggtgccactcccactgtcctttcctaataaaatgaggaaattgcatcgcattgtctgagtaggtgtcattctattctggggggtggggtggggcaggacagcaagggggaggattgggaagacaatagcaggcatgctggggatgcggtgggctctatgggcccctcctgacgcggtaggaggaggggagggtgccctgcatgtctgccgctgctcttgctcttgccgctgctgaggaggggggcgcatctgccgcagcaccggatgcatctgggaaaagcaaaaaaggggctcgtccctgtttccggaggaatttgcaagcggggtcttgcatgacggggaggcaaacccccgttcgccgcagtccggccggtccgagactcgaaccgggggtcccgcgactcaacccttggaaaataaccctccggctacagggagcgagccacttaatgctttcgctttccagcctaaccgcttacgctgcgcgcggccagtggccaaaaaagctagcgcagcagccgccgcgcctggaaggaagccaaaaggagcactcccccgttgtctgacgtcgcacacctgggttcgacacgcgggcggtaaccgcatggatcacggcggacggccggatacggggctcgaaccccggtcgtccgccatgatacccttgcgaatttatccaccagaccacggaagagtgcccgcttacaggctctccttttgcacggtctagagcgtcaacgattgcgcgcgcctgaccggccagagcgtcccgaccatggagcactttttgccgctgcgcaacatctggaaccgcgtccgcgactttccgcgcgcctccaccaccgccgccggcatcacctggatgtccaggtacatctacggata

SEQ ID NO: 18 - DNA, 986 bp, synthetic construct
  source 1..986: mol_type = other DNA
atgagacatattatctgccacggaggtgttattaccgaagaaatggccgccagtcttttggaccagctgatcgaagaggtactggctgataatcttccacctcctagccattttgaaccacctacccttcacgaactgtatgatttagacgtgacggcccccgaagatcccaacgaggaggcggtttcgcagatttttcccgactctgtaatgttggcggtgcaggaagggattgacttactcacttttccgccggcgcccggttctccggagccgcctcacctttcccggcagcccgagcagccggagcagagagccttgggtccggtttctatgccaaaccttgtaccggaggtgatcgatcttacctgccacgaggctggctttccacccagtgacgacgaggatgaagagggtgaggagtttgtgttagattatgtggagcaccccgggcacggttgcaggtcttgtcattatcaccggaggaatacgggggacccagatattatgtgttcgctttgctatatgaggacctgtggcatgtttgtctacagtaagtgaaaattatgggcagtgggtgatagagtggtgggtttggtgtggtaattttttttttaatttttacagttttgtggtttaaagaattttgtattgtgatttttttaaaaggtcctgtgtctgaacctgagcctgagcccgagccagaaccggagcctgcaagacctacccgccgtcctaaaatggcgcctgctatcctgagacgcccgacatcacctgtgtctagagaatgcaatagtagtacggatagctgtgactccggtccttctaacacacctcctgagatacacccggtggtcccgctgtgccccattaaaccagttgccgtgagagttggtgggcgtcgccaggctgtggaatgtatcgaggacttgcttaacgagcctgggcaacctttggacttgagctgtaaacgccccaggccataa

SEQ ID NO: 19 - DNA, 11039 bp, synthetic construct
  source 1..11039: mol_type = other DNA
ttaaaaatcaaaggggttctgccgcgcatcgctatgcgccactggcagggacacgttgcgatactggtgtttagtgctccacttaaactcaggcacaaccatccgcggcagctcggtgaagttttcactccacaggctgcgcaccatcaccaacgcgtttagcaggtcgggcgccgatatcttgaagtcgcagttggggcctccgccctgcgcgcgcgagttgcgatacacagggttgcagcactggaacactatcagcgccgggtggtgcacgctggccagcacgctcttgtcggagatcagatccgcgtccaggtcctccgcgttgctcagggcgaacggagtcaactttggtagctgccttcccaaaaagggcgcgtgcccaggctttgagttgcactcgcaccgtagtggcatcaaaaggtgaccgtgcccggtctgggcgttaggatacagcgcctgcataaaagccttgatctgcttaaaagccacctgagcctttgcgccttcagagaagaacatgccgcaagacttgccggaaaactgattggccggacaggccgcgtcgtgcacgcagcaccttgcgtcggtgttggagatctgcaccacatttcggccccaccggttcttcacgatcttggccttgctagactgctccttcagcgcgcgctgcccgttttcgctcgtcacatccatttcaatcacgtgctccttatttatcataatgcttccgtgtagacacttaagctcgccttcgatctcagcgcagcggtgcagccacaacgcgcagcccgtgggctcgtgatgcttgtaggtcacctctgcaaacgactgcaggtacgcctgcaggaatcgccccatcatcgtcacaaaggtcttgttgctggtgaaggtcagctgcaacccgcggtgctcctcgttcagccaggtcttgcatacggccgccagagcttccacttggtcaggcagtagtttgaagttcgcctttagatcgttatccacgtggtacttgtccatcagcgcgcgcgcagcctccatgcccttctcccacgcagacacgatcggcacactcagcgggttcatcaccgtaatttcactttccgcttcgctgggctcttcctcttcctcttgcgtccgcataccacgcgccactgggtcgtcttcattcagccgccgcactgtgcgcttacctcctttgccatgcttgattagcaccggtgggttgctgaaacccaccatttgtagcgccacatcttctctttcttcctcgctgtccacgattacctctggtgatggcgggcgctcgggcttgggagaagggcgcttctttttcttcttgggcgcaatggccaaatccgccgccgaggtcgatggccgcgggctgggtgtgcgcggcaccagcgcgtcttgtgatgagtcttcctcgtcctcggactcgatacgccgcctcatccgcttttttgggggcgcccggggaggcggcggcgacggggacggggacgacacgtcctccatggttgggggacgtcgcgccgcaccgcgtccgcgctcgggggtggtttcgcgctgctcctcttcccgactggccatttccttctcctataggcagaaaaagatcatggagtcagtcgagaagaaggacagcctaaccgccccctctgagttcgccaccaccgcctccaccgatgccgccaacgcgcctaccaccttccccgtcgaggcacccccgcttgaggaggaggaagtgattatcgagcaggacccaggttttgtaagcgaagacgacgaggaccgctcagtaccaacagaggataaaaagcaagaccaggacaacgcagaggcaaacgaggaacaagtcgggcggggggacgaaaggcatggcgactacctagatgtgggagacgacgtgctgttgaagcatctgcagcgccagtgcgccattatctgcgacgcgttgcaagagcgcagcgatgtgcccctcgccatagcggatgtcagccttgcctacgaacgccacctattctcaccgcgcgtaccccccaaacgccaagaaaacggcacatgcgagcccaacccgcgcctcaacttctaccccgtatttgccgtgccagaggtgcttgccacctatcacatctttttccaaaactgcaagatacccctatcctgccgtgccaaccgcagccgagcggacaagcagctggccttgcggcagggcgctgtcatacctgatatcgcctcgctcaacgaagtgccaaaaatctttgagggtcttggacgcgacgagaagcgcgcggcaaacgctctgcaacaggaaaacagcgaaaatgaaagtcactctggagtgttggtggaactcgagggtgacaacgcgcgcctagccgtactaaaacgcagcatcgaggtcacccactttgcctacccggcacttaacctaccccccaaggtcatgagcacagtcatgagtgagctgatcgtgcgccgtgcgcagcccctggagagggatgcaaatttgcaagaacaaacagaggagggcctacccgcagttggcgacgagcagctagcgcgctggcttcaaacgcgcgagcctgccgacttggaggagcgacgcaaactaatgatggccgcagtgctcgttaccgtggagcttgagtgcatgcagcggttctttgctgacccggagatgcagcgcaagctagaggaaacattgcactacacctttcgacagggctacgtacgccaggcctgcaagatctccaacgtggagctctgcaacctggtctcctaccttggaattttgcacgaaaaccgccttgggcaaaacgtgcttcattccacgctcaagggcgaggcgcgccgcgactacgtccgcgactgcgtttacttatttctatgctacacctggcagacggccatgggcgtttggcagcagtgcttggaggagtgcaacctcaaggagctgcagaaactgctaaagcaaaacttgaaggacctatggacggccttcaacgagcgctccgtggccgcgcacctggcggacatcattttccccgaacgcctgcttaaaaccctgcaacagggtctgccagacttcaccagtcaaagcatgttgcagaactttaggaactttatcctagagcgctcaggaatcttgcccgccacctgctgtgcacttcctagcgactttgtgcccattaagtaccgcgaatgccctccgccgctttggggccactgctaccttctgcagctagccaactaccttgcctaccactctgacataatggaagacgtgagcggtgacggtctactggagtgtcactgtcgctgcaacctatgcaccccgcaccgctccctggtttgcaattcgcagctgcttaacgaaagtcaaattatcggtacctttgagctgcagggtccctcgcctgacgaaaagtccgcggctccggggttgaaactcactccggggctgtggacgtcggcttaccttcgcaaatttgtacctgaggactaccacgcccacgagattaggttctacgaagaccaatcccgcccgcctaatgcggagcttaccgcctgcgtcattacccagggccacattcttggccaattgcaagccatcaacaaagcccgccaagagtttctgctacgaaagggacggggggtttacttggacccccagtccggcgaggagctcaacccaatccccccgccgccgcagccctatcagcagcagccgcgggcccttgcttcccaggatggcacccaaaaagaagctgcagctgccgccgccacccacggacgaggaggaatactgggacagtcaggcagaggaggttttggacgaggaggaggaggacatgatggaagactgggagagcctagacgaggaagcttccgaggtcgaagaggtgtcagacgaaacaccgtcaccctcggtcgcattcccctcgccggcgccccagaaatcggcaaccggttccagcatggctacaacctccgctcctcaggcgccgccggcactgcccgttcgccgacccaaccgtagatgggacaccactggaaccagggccggtaagtccaagcagccgccgccgttagcccaagagcaacaacagcgccaaggctaccgctcatggcgcgggcacaagaacgccatagttgcttgcttgcaagactgtgggggcaacatctccttcgcccgccgctttcttctctaccatcacggcgtggccttcccccgtaacatcctgcattactaccgtcatctctacagcccatactgcaccggcggcagcggcagcaacagcagcggccacacagaagcaaaggcgaccggatagcaagactctgacaaagcccaagaaatccacagcggcggcagcagcaggaggaggagcgctgcgtctggcgcccaacgaacccgtatcgacccgcgagcttagaaacaggatttttcccactctgtatgctatatttcaacagagcaggggccaagaacaagagctgaaaataaaaaacaggtctctgcgatccctcacccgcagctgcctgtatcacaaaagcgaagatcagcttcggcgcacgctggaagacgcggaggctctcttcagtaaatactgcgcgctgactcttaaggactagtttcgcgccctttctcaaatttaagcgcgaaaactacgtcatctccagcggccacacccggcgccagcacctgttgtcagcgccattttttagggcggagtaacttgtatgtgttgggaattgtagttttcttaaaatgggaagtgacgtaacgtgggaaaacggaagtgacgatttgaggaagttgtgggttttttggctttcgtttctgggcgtaggttcgcgtgcggttttctgggtgttttttgtggactttaaccgttacgtcattttttagtcctatatatactcgctctgcacttggcccttttttacactgtgactgattgagctggtgccgtgtcgagtggtgtttttttaataggttttcttttttactggtaaggctgactgttatgactacgtccggcgttccatttggcatgacactacgaccaacacgatctcggttgtctcggcgcactccgtacagtagggatcgtctacctccttttgagacagaaacccgcgctaccatactggaggatcatccgctgctgcccgaatgtaacactttgacaatgcacaacgtgagttacgtgcgaggtcttccctgcagtgtgggatttacgctgattcaggaatgggttgttccctgggatatggttctaacgcgggaggagcttgtaatcctgaggaagtgtatgcacgtgtgcctgtgttgtgccaacattgatatcatgacgagcatgatgatccatggttacgagtcctgggctctccactgtcattgttccagtcccggttccctgcagtgtatagccggcgggcaggttttggccagctggtttaggatggtggtggatggcgccatgtttaatcagaggtttatatggtaccgggaggtggtgaattacaacatgccaaaagaggtaatgtttatgtccagcgtgtttatgaggggtcgccacttaatctacctgcgcttgtggtatgatggccacgtgggttctgtggtccccgccatgagctttggatacagcgccttgcactgtgggattttgaacaatattgtggtgctgtgctgcagttactgtgctgatttaagtgagatcagggtgcgctgctgtgcccggaggacaaggcgccttatgctgcgggcggtgcgaatcatcgctgaggagaccactgccatgttgtattcctgcaggacggagcggcggcggcagcagtttattcgcgcgctgctgcagcaccaccgccctatcctgatgcacgattatgactctacccccatgtaggcgtggacttctccttcgccgcccgttaagcaaccgcaagttggacagcagcctgtggctcagcagctggacagcgacatgaacttaagtgagctgcccggggagtttattaatatcactgatgagcgtttggctcgacaggaaaccgtgtggaatataacacctaagaatatgtctgttacccatgatatgatgctttttaaggccagccggggagaaaggactgtgtactctgtgtgttgggagggaggtggcaggttgaatactagggttctgtgagtttgattaaggtacggtgatctgtataagctatgtggtggtggggctatactactgaatgaaaaatgacttgaaattttctgcaattgaaaaataaacacgttgaaacataacacaaacgattctttattcttgggcaatgtatgaaaaagtgtaagaggatgtggcaaatatttcattaatgtagttgtggccagaccagtcccatgaaaatgacatagagtatgcacttggagttgtgtctcctgtttcctgtgtaccgtttagtgtaatggttagtgttacaggtttagttttgtctccgtttaagtaaacttgactgacaatgttacttttggcagttttaccgtgagattttggataagctgataggttaggcataaatccaacagcgtttgtataggctgtcgacattgattattgactagttattaatagtaatcaattacggggtcattagttcatagcccatatatggagttccgcgttacataacttacggtaaatggcccgcctggctgaccgcccaacgacccccgcccattgacgtcaataatgacgtatgttcccatagtaacgccaatagggactttccattgacgtcaatgggtggagtatttacggtaaactgcccacttggcagtacatcaagtgtatcatatgccaagtacgccccctattgacgtcaatgacggtaaatggcccgcctggcattatgcccagtacatgaccttatgggactttcctacttggcagtacatctacgtattagtcatcgctattaccatggtgatgcggttttggcagtacatcaatgggcgtggatagcggtttgactcacggggatttccaagtctccaccccattgacgtcaatgggagtttgttttggcaccaaaatcaacgggactttccaaaatgtcgtaacaactccgccccattgacgcaaatgggcggtaggcgtgtacggtgggaggtctatataagcagagctctctggctaactagagaacccactgcttactggcttatcgaaattaatacgactcactatagggagacccaagctgatgagacatattatctgccacggaggtgttattaccgaagaaatggccgccagtcttttggaccagctgatcgaagaggtactggctgataatcttccacctcctagccattttgaaccacctacccttcacgaactgtatgatttagacgtgacggcccccgaagatcccaacgaggaggcggtttcgcagatttttcccgactctgtaatgttggcggtgcaggaagggattgacttactcacttttccgccggcgcccggttctccggagccgcctcacctttcccggcagcccgagcagccggagcagagagccttgggtccggtttctatgccaaaccttgtaccggaggtgatcgatcttacctgccacgaggctggctttccacccagtgacgacgaggatgaagagggtgaggagtttgtgttagattatgtggagcaccccgggcacggttgcaggtcttgtcattatcaccggaggaatacgggggacccagatattatgtgttcgctttgctatatgaggacctgtggcatgtttgtctacagtaagtgaaaattatgggcagtgggtgatagagtggtgggtttggtgtggtaattttttttttaatttttacagttttgtggtttaaagaattttgtattgtgatttttttaaaaggtcctgtgtctgaacctgagcctgagcccgagccagaaccggagcctgcaagacctacccgccgtcctaaaatggcgcctgctatcctgagacgcccgacatcacctgtgtctagagaatgcaatagtagtacggatagctgtgactccggtccttctaacacacctcctgagatacacccggtggtcccgctgtgccccattaaaccagttgccgtgagagttggtgggcgtcgccaggctgtggaatgtatcgaggacttgcttaacgagcctgggcaacctttggacttgagctgtaaacgccccaggccataaaaacccgctgatcagcctcgactgtgccttctagttgccagccatctgttgtttgcccctcccccgtgccttccttgaccctggaaggtgccactcccactgtcctttcctaataaaatgaggaaattgcatcgcattgtctgagtaggtgtcattctattctggggggtggggtggggcaggacagcaagggggaggattgggaagacaatagcaggcatgctggggatgcggtgggctctatgggcccctcctgacgcggtaggaggaggggagggtgccctgcatgtctgccgctgctcttgctcttgccgctgctgaggaggggggcgcatctgccgcagcaccggatgcatctgggaaaagcaaaaaaggggctcgtccctgtttccggaggaatttgcaagcggggtcttgcatgacggggaggcaaacccccgttcgccgcagtccggccggtccgagactcgaaccgggggtcccgcgactcaacccttggaaaataaccctccggctacagggagcgagccacttaatgctttcgctttccagcctaaccgcttacgctgcgcgcggccagtggccaaaaaagctagcgcagcagccgccgcgcctggaaggaagccaaaaggagcactcccccgttgtctgacgtcgcacacctgggttcgacacgcgggcggtaaccgcatggatcacggcggacggccggatacggggctcgaaccccggtcgtccgccatgatacccttgcgaatttatccaccagaccacggaagagtgcccgcttacaggctctccttttgcacggtctagagcgtcaacgattgcgcgcgcctgaccggccagagcgtcccgaccatggagcactttttgccgctgcgcaacatctggaaccgcgtccgcgactttccgcgcgcctccaccaccgccgccggcatcacctggatgtccaggtacatctacggatatggcaaacagctattatgggtattatgggtgcggccgcggatcccgggcccgtcgactgcagaggcctgcatgcaagcttggtgtaatcatggtcatagctgtttcctgtgtgaaattgttatccgctcacaattccacacaacatacgagccggaagcataaagtgtaaagcctggggtgcctaatgagtgagctaactcacattaattgcgttgcgctcactgcccgctttccagtcgggaaacctgtcgtgccagctgcattaatgaatcggccaacgcgcggggagaggcggtttgcgtattgggcgctcttccgcttcctcgctcactgactcgctgcgctcggtcgttcggctgcggcgagcggtatcagctcactcaaaggcggtaatacggttatccacagaatcaggggataacgcaggaaagaacatgtgagcaaaaggccagcaaaaggccaggaaccgtaaaaaggccgcgttgctggcgtttttccataggctccgcccccctgacgagcatcacaaaaatcgacgctcaagtcagaggtggcgaaacccgacaggactataaagataccaggcgtttccccctggaagctccctcgtgcgctctcctgttccgaccctgccgcttaccggatacctgtccgcctttctcccttcgggaagcgtggcgctttctcatagctcacgctgtaggtatctcagttcggtgtaggtcgttcgctccaagctgggctgtgtgcacgaaccccccgttcagcccgaccgctgcgccttatccggtaactatcgtcttgagtccaacccggtaagacacgacttatcgccactggcagcagccactggtaacaggattagcagagcgaggtatgtaggcggtgctacagagttcttgaagtggtggcctaactacggctacactagaagaacagtatttggtatctgcgctctgctgaagccagttaccttcggaaaaagagttggtagctcttgatccggcaaacaaaccaccgctggtagcggtggtttttttgtttgcaagcagcagattacgcgcagaaaaaaaggatctcaagaagatcctttgatcttttctacggggtctgacgctcagtggaacgaaaactcacgttaagggattttggtcatgagattatcaaaaaggatcttcacctagatccttttaaattaaaaatgaagttttaaatcaagcccaatctgaataatgttacaaccaattaaccaattctgattagaaaaactcatcgagcatcaaatgaaactgcaatttattcatatcaggattatcaataccatatttttgaaaaagccgtttctgtaatgaaggagaaaactcaccgaggcagttccataggatggcaagatcctggtatcggtctgcgattccgactcgtccaacatcaatacaacctattaatttcccctcgtcaaaaataaggttatcaagtgagaaatcaccatgagtgacgactgaatccggtgagaatggcaaaagtttatgcatttctttccagacttgttcaacaggccagccattacgctcgtcatcaaaatcactcgcatcaaccaaaccgttattcattcgtgattgcgcctgagcgagacgaaatacgcgatcgctgttaaaaggacaattacaaacaggaatcgaatgcaaccggcgcaggaacactgccagcgcatcaacaatattttcacctgaatcaggatattcttctaatacctggaatgctgtttttccggggatcgcagtggtgagtaaccatgcatcatcaggagtacggata

SEQ ID NO: 20 - DNA, 11110 bp, synthetic construct
  source 1..11110: mol_type = other DNA
aataaaggcaaatgcttttatttgtacactctcgggtgattatttacccccacccttgccgtctgcgccgtttaaaaatcaaaggggttctgccgcgcatcgctatgcgccactggcagggacacgttgcgatactggtgtttagtgctccacttaaactcaggcacaaccatccgcggcagctcggtgaagttttcactccacaggctgcgcaccatcaccaacgcgtttagcaggtcgggcgccgatatcttgaagtcgcagttggggcctccgccctgcgcgcgcgagttgcgatacacagggttgcagcactggaacactatcagcgccgggtggtgcacgctggccagcacgctcttgtcggagatcagatccgcgtccaggtcctccgcgttgctcagggcgaacggagtcaactttggtagctgccttcccaaaaagggcgcgtgcccaggctttgagttgcactcgcaccgtagtggcatcaaaaggtgaccgtgcccggtctgggcgttaggatacagcgcctgcataaaagccttgatctgcttaaaagccacctgagcctttgcgccttcagagaagaacatgccgcaagacttgccggaaaactgattggccggacaggccgcgtcgtgcacgcagcaccttgcgtcggtgttggagatctgcaccacatttcggccccaccggttcttcacgatcttggccttgctagactgctccttcagcgcgcgctgcccgttttcgctcgtcacatccatttcaatcacgtgctccttatttatcataatgcttccgtgtagacacttaagctcgccttcgatctcagcgcagcggtgcagccacaacgcgcagcccgtgggctcgtgatgcttgtaggtcacctctgcaaacgactgcaggtacgcctgcaggaatcgccccatcatcgtcacaaaggtcttgttgctggtgaaggtcagctgcaacccgcggtgctcctcgttcagccaggtcttgcatacggccgccagagcttccacttggtcaggcagtagtttgaagttcgcctttagatcgttatccacgtggtacttgtccatcagcgcgcgcgcagcctccatgcccttctcccacgcagacacgatcggcacactcagcgggttcatcaccgtaatttcactttccgcttcgctgggctcttcctcttcctcttgcgtccgcataccacgcgccactgggtcgtcttcattcagccgccgcactgtgcgcttacctcctttgccatgcttgattagcaccggtgggttgctgaaacccaccatttgtagcgccacatcttctctttcttcctcgctgtccacgattacctctggtgatggcgggcgctcgggcttgggagaagggcgcttctttttcttcttgggcgcaatggccaaatccgccgccgaggtcgatggccgcgggctgggtgtgcgcggcaccagcgcgtcttgtgatgagtcttcctcgtcctcggactcgatacgccgcctcatccgcttttttgggggcgcccggggaggcggcggcgacggggacggggacgacacgtcctccatggttgggggacgtcgcgccgcaccgcgtccgcgctcgggggtggtttcgcgctgctcctcttcccgactggccatttccttctcctataggcagaaaaagatcatggagtcagtcgagaagaaggacagcctaaccgccccctctgagttcgccaccaccgcctccaccgatgccgccaacgcgcctaccaccttccccgtcgaggcacccccgcttgaggaggaggaagtgattatcgagcaggacccaggttttgtaagcgaagacgacgaggaccgctcagtaccaacagaggataaaaagcaagaccaggacaacgcagaggcaaacgaggaacaagtcgggcggggggacgaaaggcatggcgactacctagatgtgggagacgacgtgctgttgaagcatctgcagcgccagtgcgccattatctgcgacgcgttgcaagagcgcagcgatgtgcccctcgccatagcggatgtcagccttgcctacgaacgccacctattctcaccgcgcgtaccccccaaacgccaagaaaacggcacatgcgagcccaacccgcgcctcaacttctaccccgtatttgccgtgccagaggtgcttgccacctatcacatctttttccaaaactgcaagatacccctatcctgccgtgccaaccgcagccgagcggacaagcagctggccttgcggcagggcgctgtcatacctgatatcgcctcgctcaacgaagtgccaaaaatctttgagggtcttggacgcgacgagaagcgcgcggcaaacgctctgcaacaggaaaacagcgaaaatgaaagtcactctggagtgttggtggaactcgagggtgacaacgcgcgcctagccgtactaaaacgcagcatcgaggtcacccactttgcctacccggcacttaacctaccccccaaggtcatgagcacagtcatgagtgagctgatcgtgcgccgtgcgcagcccctggagagggatgcaaatttgcaagaacaaacagaggagggcctacccgcagttggcgacgagcagctagcgcgctggcttcaaacgcgcgagcctgccgacttggaggagcgacgcaaactaatgatggccgcagtgctcgttaccgtggagcttgagtgcatgcagcggttctttgctgacccggagatgcagcgcaagctagaggaaacattgcactacacctttcgacagggctacgtacgccaggcctgcaagatctccaacgtggagctctgcaacctggtctcctaccttggaattttgcacgaaaaccgccttgggcaaaacgtgcttcattccacgctcaagggcgaggcgcgccgcgactacgtccgcgactgcgtttacttatttctatgctacacctggcagacggccatgggcgtttggcagcagtgcttggaggagtgcaacctcaaggagctgcagaaactgctaaagcaaaacttgaaggacctatggacggccttcaacgagcgctccgtggccgcgcacctggcggacatcattttccccgaacgcctgcttaaaaccctgcaacagggtctgccagacttcaccagtcaaagcatgttgcagaactttaggaactttatcctagagcgctcaggaatcttgcccgccacctgctgtgcacttcctagcgactttgtgcccattaagtaccgcgaatgccctccgccgctttggggccactgctaccttctgcagctagccaactaccttgcctaccactctgacataatggaagacgtgagcggtgacggtctactggagtgtcactgtcgctgcaacctatgcaccccgcaccgctccctggtttgcaattcgcagctgcttaacgaaagtcaaattatcggtacctttgagctgcagggtccctcgcctgacgaaaagtccgcggctccggggttgaaactcactccggggctgtggacgtcggcttaccttcgcaaatttgtacctgaggactaccacgcccacgagattaggttctacgaagaccaatcccgcccgcctaatgcggagcttaccgcctgcgtcattacccagggccacattcttggccaattgcaagccatcaacaaagcccgccaagagtttctgctacgaaagggacggggggtttacttggacccccagtccggcgaggagctcaacccaatccccccgccgccgcagccctatcagcagcagccgcgggcccttgcttcccaggatggcacccaaaaagaagctgcagctgccgccgccacccacggacgaggaggaatactgggacagtcaggcagaggaggttttggacgaggaggaggaggacatgatggaagactgggagagcctagacgaggaagcttccgaggtcgaagaggtgtcagacgaaacaccgtcaccctcggtcgcattcccctcgccggcgccccagaaatcggcaaccggttccagcatggctacaacctccgctcctcaggcgccgccggcactgcccgttcgccgacccaaccgtagatgggacaccactggaaccagggccggtaagtccaagcagccgccgccgttagcccaagagcaacaacagcgccaaggctaccgctcatggcgcgggcacaagaacgccatagttgcttgcttgcaagactgtgggggcaacatctccttcgcccgccgctttcttctctaccatcacggcgtggccttcccccgtaacatcctgcattactaccgtcatctctacagcccatactgcaccggcggcagcggcagcaacagcagcggccacacagaagcaaaggcgaccggatagcaagactctgacaaagcccaagaaatccacagcggcggcagcagcaggaggaggagcgctgcgtctggcgcccaacgaacccgtatcgacccgcgagcttagaaacaggatttttcccactctgtatgctatatttcaacagagcaggggccaagaacaagagctgaaaataaaaaacaggtctctgcgatccctcacccgcagctgcctgtatcacaaaagcgaagatcagcttcggcgcacgctggaagacgcggaggctctcttcagtaaatactgcgcgctgactcttaaggactagtttcgcgccctttctcaaatttaagcgcgaaaactacgtcatctccagcggccacacccggcgccagcacctgttgtcagcgccattttttagggcggagtaacttgtatgtgttgggaattgtagttttcttaaaatgggaagtgacgtaacgtgggaaaacggaagtgacgatttgaggaagttgtgggttttttggctttcgtttctgggcgtaggttcgcgtgcggttttctgggtgttttttgtggactttaaccgttacgtcattttttagtcctatatatactcgctctgcacttggcccttttttacactgtgactgattgagctggtgccgtgtcgagtggtgtttttttaataggttttcttttttactggtaaggctgactgttatgactacgtccggcgttccatttggcatgacactacgaccaacacgatctcggttgtctcggcgcactccgtacagtagggatcgtctacctccttttgagacagaaacccgcgctaccatactggaggatcatccgctgctgcccgaatgtaacactttgacaatgcacaacgtgagttacgtgcgaggtcttccctgcagtgtgggatttacgctgattcaggaatgggttgttccctgggatatggttctaacgcgggaggagcttgtaatcctgaggaagtgtatgcacgtgtgcctgtgttgtgccaacattgatatcatgacgagcatgatgatccatggttacgagtcctgggctctccactgtcattgttccagtcccggttccctgcagtgtatagccggcgggcaggttttggccagctggtttaggatggtggtggatggcgccatgtttaatcagaggtttatatggtaccgggaggtggtgaattacaacatgccaaaagaggtaatgtttatgtccagcgtgtttatgaggggtcgccacttaatctacctgcgcttgtggtatgatggccacgtgggttctgtggtccccgccatgagctttggatacagcgccttgcactgtgggattttgaacaatattgtggtgctgtgctgcagttactgtgctgatttaagtgagatcagggtgcgctgctgtgcccggaggacaaggcgccttatgctgcgggcggtgcgaatcatcgctgaggagaccactgccatgttgtattcctgcaggacggagcggcggcggcagcagtttattcgcgcgctgctgcagcaccaccgccctatcctgatgcacgattatgactctacccccatgtaggcgtggacttctccttcgccgcccgttaagcaaccgcaagttggacagcagcctgtggctcagcagctggacagcgacatgaacttaagtgagctgcccggggagtttattaatatcactgatgagcgtttggctcgacaggaaaccgtgtggaatataacacctaagaatatgtctgttacccatgatatgatgctttttaaggccagccggggagaaaggactgtgtactctgtgtgttgggagggaggtggcaggttgaatactagggttctgtgagtttgattaaggtacggtgatctgtataagctatgtggtggtggggctatactactgaatgaaaaatgacttgaaattttctgcaattgaaaaataaacacgttgaaacataacacaaacgattctttattcttgggcaatgtatgaaaaagtgtaagaggatgtggcaaatatttcattaatgtagttgtggccagaccagtcccatgaaaatgacatagagtatgcacttggagttgtgtctcctgtttcctgtgtaccgtttagtgtaatggttagtgttacaggtttagttttgtctccgtttaagtaaacttgactgacaatgttacttttggcagttttaccgtgagattttggataagctgataggttaggcataaatccaacagcgtttgtataggctgtcgacattgattattgactagttattaatagtaatcaattacggggtcattagttcatagcccatatatggagttccgcgttacataacttacggtaaatggcccgcctggctgaccgcccaacgacccccgcccattgacgtcaataatgacgtatgttcccatagtaacgccaatagggactttccattgacgtcaatgggtggagtatttacggtaaactgcccacttggcagtacatcaagtgtatcatatgccaagtacgccccctattgacgtcaatgacggtaaatggcccgcctggcattatgcccagtacatgaccttatgggactttcctacttggcagtacatctacgtattagtcatcgctattaccatggtgatgcggttttggcagtacatcaatgggcgtggatagcggtttgactcacggggatttccaagtctccaccccattgacgtcaatgggagtttgttttggcaccaaaatcaacgggactttccaaaatgtcgtaacaactccgccccattgacgcaaatgggcggtaggcgtgtacggtgggaggtctatataagcagagctctctggctaactagagaacccactgcttactggcttatcgaaattaatacgactcactatagggagacccaagctgatgagacatattatctgccacggaggtgttattaccgaagaaatggccgccagtcttttggaccagctgatcgaagaggtactggctgataatcttccacctcctagccattttgaaccacctacccttcacgaactgtatgatttagacgtgacggcccccgaagatcccaacgaggaggcggtttcgcagatttttcccgactctgtaatgttggcggtgcaggaagggattgacttactcacttttccgccggcgcccggttctccggagccgcctcacctttcccggcagcccgagcagccggagcagagagccttgggtccggtttctatgccaaaccttgtaccggaggtgatcgatcttacctgccacgaggctggctttccacccagtgacgacgaggatgaagagggtgaggagtttgtgttagattatgtggagcaccccgggcacggttgcaggtcttgtcattatcaccggaggaatacgggggacccagatattatgtgttcgctttgctatatgaggacctgtggcatgtttgtctacagtaagtgaaaattatgggcagtgggtgatagagtggtgggtttggtgtggtaattttttttttaatttttacagttttgtggtttaaagaattttgtattgtgatttttttaaaaggtcctgtgtctgaacctgagcctgagcccgagccagaaccggagcctgcaagacctacccgccgtcctaaaatggcgcctgctatcctgagacgcccgacatcacctgtgtctagagaatgcaatagtagtacggatagctgtgactccggtccttctaacacacctcctgagatacacccggtggtcccgctgtgccccattaaaccagttgccgtgagagttggtgggcgtcgccaggctgtggaatgtatcgaggacttgcttaacgagcctgggcaacctttggacttgagctgtaaacgccccaggccataaaaacccgctgatcagcctcgactgtgccttctagttgccagccatctgttgtttgcccctcccccgtgccttccttgaccctggaaggtgccactcccactgtcctttcctaataaaatgaggaaattgcatcgcattgtctgagtaggtgtcattctattctggggggtggggtggggcaggacagcaagggggaggattgggaagacaatagcaggcatgctggggatgcggtgggctctatgggcccctcctgacgcggtaggaggaggggagggtgccctgcatgtctgccgctgctcttgctcttgccgctgctgaggaggggggcgcatctgccgcagcaccggatgcatctgggaaaagcaaaaaaggggctcgtccctgtttccggaggaatttgcaagcggggtcttgcatgacggggaggcaaacccccgttcgccgcagtccggccggtccgagactcgaaccgggggtcccgcgactcaacccttggaaaataaccctccggctacagggagcgagccacttaatgctttcgctttccagcctaaccgcttacgctgcgcgcggccagtggccaaaaaagctagcgcagcagccgccgcgcctggaaggaagccaaaaggagcactcccccgttgtctgacgtcgcacacctgggttcgacacgcgggcggtaaccgcatggatcacggcggacggccggatacggggctcgaaccccggtcgtccgccatgatacccttgcgaatttatccaccagaccacggaagagtgcccgcttacaggctctccttttgcacggtctagagcgtcaacgattgcgcgcgcctgaccggccagagcgtcccgaccatggagcactttttgccgctgcgcaacatctggaaccgcgtccgcgactttccgcgcgcctccaccaccgccgccggcatcacctggatgtccaggtacatctacggatatggcaaacagctattatgggtattatgggtgcggccgcggatcccgggcccgtcgactgcagaggcctgcatgcaagcttggtgtaatcatggtcatagctgtttcctgtgtgaaattgttatccgctcacaattccacacaacatacgagccggaagcataaagtgtaaagcctggggtgcctaatgagtgagctaactcacattaattgcgttgcgctcactgcccgctttccagtcgggaaacctgtcgtgccagctgcattaatgaatcggccaacgcgcggggagaggcggtttgcgtattgggcgctcttccgcttcctcgctcactgactcgctgcgctcggtcgttcggctgcggcgagcggtatcagctcactcaaaggcggtaatacggttatccacagaatcaggggataacgcaggaaagaacatgtgagcaaaaggccagcaaaaggccaggaaccgtaaaaaggccgcgttgctggcgtttttccataggctccgcccccctgacgagcatcacaaaaatcgacgctcaagtcagaggtggcgaaacccgacaggactataaagataccaggcgtttccccctggaagctccctcgtgcgctctcctgttccgaccctgccgcttaccggatacctgtccgcctttctcccttcgggaagcgtggcgctttctcatagctcacgctgtaggtatctcagttcggtgtaggtcgttcgctccaagctgggctgtgtgcacgaaccccccgttcagcccgaccgctgcgccttatccggtaactatcgtcttgagtccaacccggtaagacacgacttatcgccactggcagcagccactggtaacaggattagcagagcgaggtatgtaggcggtgctacagagttcttgaagtggtggcctaactacggctacactagaagaacagtatttggtatctgcgctctgctgaagccagttaccttcggaaaaagagttggtagctcttgatccggcaaacaaaccaccgctggtagcggtggtttttttgtttgcaagcagcagattacgcgcagaaaaaaaggatctcaagaagatcctttgatcttttctacggggtctgacgctcagtggaacgaaaactcacgttaagggattttggtcatgagattatcaaaaaggatcttcacctagatccttttaaattaaaaatgaagttttaaatcaagcccaatctgaataatgttacaaccaattaaccaattctgattagaaaaactcatcgagcatcaaatgaaactgcaatttattcatatcaggattatcaataccatatttttgaaaaagccgtttctgtaatgaaggagaaaactcaccgaggcagttccataggatggcaagatcctggtatcggtctgcgattccgactcgtccaacatcaatacaacctattaatttcccctcgtcaaaaataaggttatcaagtgagaaatcaccatgagtgacgactgaatccggtgagaatggcaaaagtttatgcatttctttccagacttgttcaacaggccagccattacgctcgtcatcaaaatcactcgcatcaaccaaaccgttattcattcgtgattgcgcctgagcgagacgaaatacgcgatcgctgttaaaaggacaattacaaacaggaatcgaatgcaaccggcgcaggaacactgccagcgcatcaacaatattttcacctgaatcaggatattcttctaatacctggaatgctgtttttccggggatcgcagtggtgagtaaccatgcatcatcaggagtacggata

SEQ ID NO: 21 - DNA, 1826 bp, synthetic construct
  source 1..1826: mol_type = other DNA
atggagtcagtcgagaagaaggacagcctaaccgccccctctgagttcgccaccaccgcctccaccgatgccgccaacgcgcctaccaccttccccgtcgaggcacccccgcttgaggaggaggaagtgattatcgagcaggacccaggttttgtaagcgaagacgacgaggaccgctcagtaccaacagaggataaaaagcaagaccaggacaacgcagaggcaaacgaggaacaagtcgggcggggggacgaaaggcatggcgactacctagatgtgggagacgacgtgctgttgaagcatctgcagcgccagtgcgccattatctgcgacgcgttgcaagagcgcagcgatgtgcccctcgccatagcggatgtcagccttgcctacgaacgccacctattctcaccgcgcgtaccccccaaacgccaagaaaacggcacatgcgagcccaacccgcgcctcaacttctaccccgtatttgccgtgccagaggtgcttgccacctatcacatctttttccaaaactgcaagatacccctatcctgccgtgccaaccgcagccgagcggacaagcagctggccttgcggcagggcgctgtcatacctgatatcgcctcgctcaacgaagtgccaaaaatctttgagggtcttggacgcgacgagaagcgcgcggcaaacgctctgcaacaggaaaacagcgaaaatgaaagtcactctggagtgttggtggaactcgagggtgacaacgcgcgcctagccgtactaaaacgcagcatcgaggtcacccactttgcctacccggcacttaacctaccccccaaggtcatgagcacagtcatgagtgagctgatcgtgcgccgtgcgcagcccctggagagggatgcaaatttgcaagaacaaacagaggagggcctacccgcagttggcgacgagcagctagcgcgctggcttcaaacgcgcgagcctgccgacttggaggagcgacgcaaactaatgatggccgcagtgctcgttaccgtggagcttgagtgcatgcagcggttctttgctgacccggagatgcagcgcaagctagaggaaacattgcactacacctttcgacagggctacgtacgccaggcctgcaagatctccaacgtggagctctgcaacctggtctcctaccttggaattttgcacgaaaaccgccttgggcaaaacgtgcttcattccacgctcaagggcgaggcgcgccgcgactacgtccgcgactgcgtttacttatttctatgctacacctggcagacggccatgggcgtttggcagcagtgcttggaggagtgcaacctcaaggagctgcagaaactgctaaagcaaaacttgaaggacctatggacggccttcaacgagcgctccgtggccgcgcacctggcggacatcattttccccgaacgcctgcttaaaaccctgcaacagggtctgccagacttcaccagtcaaagcatgttgcagaactttaggaactttatcctagagcgctcaggaatcttgcccgccacctgctgtgcacttcctagcgactttgtgcccattaagtaccgcgaatgccctccgccgctttggggccactgctaccttctgcagctagccaactaccttgcctaccactctgacataatggaagacgtgagcggtgacggtctactggagtgtcactgtcgctgcaacctatgcaccccgcaccgctccctggtttgcaattcgcagctgcttaacgaaagtcaaattatcggtacctttgagctgcagggtccctcgcctgacgaaaagtccgcggctccggg

SEQ ID NO: 22 - DNA, 2853 bp, synthetic construct
  source 1..2853: mol_type = other DNA
ttaaaaatcaaaggggttctgccgcgcatcgctatgcgccactggcagggacacgttgcgatactggtgtttagtgctccacttaaactcaggcacaaccatccgcggcagctcggtgaagttttcactccacaggctgcgcaccatcaccaacgcgtttagcaggtcgggcgccgatatcttgaagtcgcagttggggcctccgccctgcgcgcgcgagttgcgatacacagggttgcagcactggaacactatcagcgccgggtggtgcacgctggccagcacgctcttgtcggagatcagatccgcgtccaggtcctccgcgttgctcagggcgaacggagtcaactttggtagctgccttcccaaaaagggcgcgtgcccaggctttgagttgcactcgcaccgtagtggcatcaaaaggtgaccgtgcccggtctgggcgttaggatacagcgcctgcataaaagccttgatctgcttaaaagccacctgagcctttgcgccttcagagaagaacatgccgcaagacttgccggaaaactgattggccggacaggccgcgtcgtgcacgcagcaccttgcgtcggtgttggagatctgcaccacatttcggccccaccggttcttcacgatcttggccttgctagactgctccttcagcgcgcgctgcccgttttcgctcgtcacatccatttcaatcacgtgctccttatttatcataatgcttccgtgtagacacttaagctcgccttcgatctcagcgcagcggtgcagccacaacgcgcagcccgtgggctcgtgatgcttgtaggtcacctctgcaaacgactgcaggtacgcctgcaggaatcgccccatcatcgtcacaaaggtcttgttgctggtgaaggtcagctgcaacccgcggtgctcctcgttcagccaggtcttgcatacggccgccagagcttccacttggtcaggcagtagtttgaagttcgcctttagatcgttatccacgtggtacttgtccatcagcgcgcgcgcagcctccatgcccttctcccacgcagacacgatcggcacactcagcgggttcatcaccgtaatttcactttccgcttcgctgggctcttcctcttcctcttgcgtccgcataccacgcgccactgggtcgtcttcattcagccgccgcactgtgcgcttacctcctttgccatgcttgattagcaccggtgggttgctgaaacccaccatttgtagcgccacatcttctctttcttcctcgctgtccacgattacctctggtgatggcgggcgctcgggcttgggagaagggcgcttctttttcttcttgggcgcaatggccaaatccgccgccgaggtcgatggccgcgggctgggtgtgcgcggcaccagcgcgtcttgtgatgagtcttcctcgtcctcggactcgatacgccgcctcatccgcttttttgggggcgcccggggaggcggcggcgacggggacggggacgacacgtcctccatggttgggggacgtcgcgccgcaccgcgtccgcgctcgggggtggtttcgcgctgctcctcttcccgactggccatttccttctcctataggcagaaaaagatcgttgaaactcactccggggctgtggacgtcggcttaccttcgcaaatttgtacctgaggactaccacgcccacgagattaggttctacgaagaccaatcccgcccgcctaatgcggagcttaccgcctgcgtcattacccagggccacattcttggccaattgcaagccatcaacaaagcccgccaagagtttctgctacgaaagggacggggggtttacttggacccccagtccggcgaggagctcaacccaatccccccgccgccgcagccctatcagcagcagccgcgggcccttgcttcccaggatggcacccaaaaagaagctgcagctgccgccgccacccacggacgaggaggaatactgggacagtcaggcagaggaggttttggacgaggaggaggaggacatgatggaagactgggagagcctagacgaggaagcttccgaggtcgaagaggtgtcagacgaaacaccgtcaccctcggtcgcattcccctcgccggcgccccagaaatcggcaaccggttccagcatggctacaacctccgctcctcaggcgccgccggcactgcccgttcgccgacccaaccgtagatgggacaccactggaaccagggccggtaagtccaagcagccgccgccgttagcccaagagcaacaacagcgccaaggctaccgctcatggcgcgggcacaagaacgccatagttgcttgcttgcaagactgtgggggcaacatctccttcgcccgccgctttcttctctaccatcacggcgtggccttcccccgtaacatcctgcattactaccgtcatctctacagcccatactgcaccggcggcagcggcagcaacagcagcggccacacagaagcaaaggcgaccggatagcaagactctgacaaagcccaagaaatccacagcggcggcagcagcaggaggaggagcgctgcgtctggcgcccaacgaacccgtatcgacccgcgagcttagaaacaggatttttcccactctgtatgctatatttcaacagagcaggggccaagaacaagagctgaaaataaaaaacaggtctctgcgatccctcacccgcagctgcctgtatcacaaaagcgaagatcagcttcggcgcacgctggaagacgcggaggctctcttcagtaaatactgcgcgctgactcttaaggactagtttcgcgccctttctcaaatttaagcgcgaaaactacgtca

SEQ ID NO: 23 - DNA, 4679 bp, synthetic construct
  source 1..4679: mol_type = other DNA
ttaaaaatcaaaggggttctgccgcgcatcgctatgcgccactggcagggacacgttgcgatactggtgtttagtgctccacttaaactcaggcacaaccatccgcggcagctcggtgaagttttcactccacaggctgcgcaccatcaccaacgcgtttagcaggtcgggcgccgatatcttgaagtcgcagttggggcctccgccctgcgcgcgcgagttgcgatacacagggttgcagcactggaacactatcagcgccgggtggtgcacgctggccagcacgctcttgtcggagatcagatccgcgtccaggtcctccgcgttgctcagggcgaacggagtcaactttggtagctgccttcccaaaaagggcgcgtgcccaggctttgagttgcactcgcaccgtagtggcatcaaaaggtgaccgtgcccggtctgggcgttaggatacagcgcctgcataaaagccttgatctgcttaaaagccacctgagcctttgcgccttcagagaagaacatgccgcaagacttgccggaaaactgattggccggacaggccgcgtcgtgcacgcagcaccttgcgtcggtgttggagatctgcaccacatttcggccccaccggttcttcacgatcttggccttgctagactgctccttcagcgcgcgctgcccgttttcgctcgtcacatccatttcaatcacgtgctccttatttatcataatgcttccgtgtagacacttaagctcgccttcgatctcagcgcagcggtgcagccacaacgcgcagcccgtgggctcgtgatgcttgtaggtcacctctgcaaacgactgcaggtacgcctgcaggaatcgccccatcatcgtcacaaaggtcttgttgctggtgaaggtcagctgcaacccgcggtgctcctcgttcagccaggtcttgcatacggccgccagagcttccacttggtcaggcagtagtttgaagttcgcctttagatcgttatccacgtggtacttgtccatcagcgcgcgcgcagcctccatgcccttctcccacgcagacacgatcggcacactcagcgggttcatcaccgtaatttcactttccgcttcgctgggctcttcctcttcctcttgcgtccgcataccacgcgccactgggtcgtcttcattcagccgccgcactgtgcgcttacctcctttgccatgcttgattagcaccggtgggttgctgaaacccaccatttgtagcgccacatcttctctttcttcctcgctgtccacgattacctctggtgatggcgggcgctcgggcttgggagaagggcgcttctttttcttcttgggcgcaatggccaaatccgccgccgaggtcgatggccgcgggctgggtgtgcgcggcaccagcgcgtcttgtgatgagtcttcctcgtcctcggactcgatacgccgcctcatccgcttttttgggggcgcccggggaggcggcggcgacggggacggggacgacacgtcctccatggttgggggacgtcgcgccgcaccgcgtccgcgctcgggggtggtttcgcgctgctcctcttcccgactggccatttccttctcctataggcagaaaaagatctgatgatcagtcgagaagaaggacagcctaaccgccccctctgagttcgccaccaccgcctccaccgatgccgccaacgcgcctaccaccttccccgtcgaggcacccccgcttgaggaggaggaagtgattatcgagcaggacccaggttttgtaagcgaagacgacgaggaccgctcagtaccaacagaggataaaaagcaagaccaggacaacgcagaggcaaacgaggaacaagtcgggcggggggacgaaaggcatggcgactacctagatgtgggagacgacgtgctgttgaagcatctgcagcgccagtgcgccattatctgcgacgcgttgcaagagcgcagcgatgtgcccctcgccatagcggatgtcagccttgcctacgaacgccacctattctcaccgcgcgtaccccccaaacgccaagaaaacggcacatgcgagcccaacccgcgcctcaacttctaccccgtatttgccgtgccagaggtgcttgccacctatcacatctttttccaaaactgcaagatacccctatcctgccgtgccaaccgcagccgagcggacaagcagctggccttgcggcagggcgctgtcatacctgatatcgcctcgctcaacgaagtgccaaaaatctttgagggtcttggacgcgacgagaagcgcgcggcaaacgctctgcaacaggaaaacagcgaaaatgaaagtcactctggagtgttggtggaactcgagggtgacaacgcgcgcctagccgtactaaaacgcagcatcgaggtcacccactttgcctacccggcacttaacctaccccccaaggtcatgagcacagtcatgagtgagctgatcgtgcgccgtgcgcagcccctggagagggatgcaaatttgcaagaacaaacagaggagggcctacccgcagttggcgacgagcagctagcgcgctggcttcaaacgcgcgagcctgccgacttggaggagcgacgcaaactaatgatggccgcagtgctcgttaccgtggagcttgagtgcatgcagcggttctttgctgacccggagatgcagcgcaagctagaggaaacattgcactacacctttcgacagggctacgtacgccaggcctgcaagatctccaacgtggagctctgcaacctggtctcctaccttggaattttgcacgaaaaccgccttgggcaaaacgtgcttcattccacgctcaagggcgaggcgcgccgcgactacgtccgcgactgcgtttacttatttctatgctacacctggcagacggccatgggcgtttggcagcagtgcttggaggagtgcaacctcaaggagctgcagaaactgctaaagcaaaacttgaaggacctatggacggccttcaacgagcgctccgtggccgcgcacctggcggacatcattttccccgaacgcctgcttaaaaccctgcaacagggtctgccagacttcaccagtcaaagcatgttgcagaactttaggaactttatcctagagcgctcaggaatcttgcccgccacctgctgtgcacttcctagcgactttgtgcccattaagtaccgcgaatgccctccgccgctttggggccactgctaccttctgcagctagccaactaccttgcctaccactctgacataatggaagacgtgagcggtgacggtctactggagtgtcactgtcgctgcaacctatgcaccccgcaccgctccctggtttgcaattcgcagctgcttaacgaaagtcaaattatcggtacctttgagctgcagggtccctcgcctgacgaaaagtccgcggctccggggttgaaactcactccggggctgtggacgtcggcttaccttcgcaaatttgtacctgaggactaccacgcccacgagattaggttctacgaagaccaatcccgcccgcctaatgcggagcttaccgcctgcgtcattacccagggccacattcttggccaattgcaagccatcaacaaagcccgccaagagtttctgctacgaaagggacggggggtttacttggacccccagtccggcgaggagctcaacccaatccccccgccgccgcagccctatcagcagcagccgcgggcccttgcttcccaggatggcacccaaaaagaagctgcagctgccgccgccacccacggacgaggaggaatactgggacagtcaggcagaggaggttttggacgaggaggaggaggacatgatggaagactgggagagcctagacgaggaagcttccgaggtcgaagaggtgtcagacgaaacaccgtcaccctcggtcgcattcccctcgccggcgccccagaaatcggcaaccggttccagcatggctacaacctccgctcctcaggcgccgccggcactgcccgttcgccgacccaaccgtagatgggacaccactggaaccagggccggtaagtccaagcagccgccgccgttagcccaagagcaacaacagcgccaaggctaccgctcatggcgcgggcacaagaacgccatagttgcttgcttgcaagactgtgggggcaacatctccttcgcccgccgctttcttctctaccatcacggcgtggccttcccccgtaacatcctgcattactaccgtcatctctacagcccatactgcaccggcggcagcggcagcaacagcagcggccacacagaagcaaaggcgaccggatagcaagactctgacaaagcccaagaaatccacagcggcggcagcagcaggaggaggagcgctgcgtctggcgcccaacgaacccgtatcgacccgcgagcttagaaacaggatttttcccactctgtatgctatatttcaacagagcaggggccaagaacaagagctgaaaataaaaaacaggtctctgcgatccctcacccgcagctgcctgtatcacaaaagcgaagatcagcttcggcgcacgctggaagacgcggaggctctcttcagtaaatactgcgcgctgactcttaaggactagtttcgcgccctttctcaaatttaagcgcgaaaactacgtca

SEQ ID NO: 24 - DNA, 4679 bp, synthetic construct
  source 1..4679: mol_type = other DNA
ttaaaaatcaaaggggttctgccgcgcatcgctatgcgccactggcagggacacgttgcgatactggtgtttagtgctccacttaaactcaggcacaaccatccgcggcagctcggtgaagttttcactccacaggctgcgcaccatcaccaacgcgtttagcaggtcgggcgccgatatcttgaagtcgcagttggggcctccgccctgcgcgcgcgagttgcgatacacagggttgcagcactggaacactatcagcgccgggtggtgcacgctggccagcacgctcttgtcggagatcagatccgcgtccaggtcctccgcgttgctcagggcgaacggagtcaactttggtagctgccttcccaaaaagggcgcgtgcccaggctttgagttgcactcgcaccgtagtggcatcaaaaggtgaccgtgcccggtctgggcgttaggatacagcgcctgcataaaagccttgatctgcttaaaagccacctgagcctttgcgccttcagagaagaacatgccgcaagacttgccggaaaactgattggccggacaggccgcgtcgtgcacgcagcaccttgcgtcggtgttggagatctgcaccacatttcggccccaccggttcttcacgatcttggccttgctagactgctccttcagcgcgcgctgcccgttttcgctcgtcacatccatttcaatcacgtgctccttatttatcataatgcttccgtgtagacacttaagctcgccttcgatctcagcgcagcggtgcagccacaacgcgcagcccgtgggctcgtgatgcttgtaggtcacctctgcaaacgactgcaggtacgcctgcaggaatcgccccatcatcgtcacaaaggtcttgttgctggtgaaggtcagctgcaacccgcggtgctcctcgttcagccaggtcttgcatacggccgccagagcttccacttggtcaggcagtagtttgaagttcgcctttagatcgttatccacgtggtacttgtccatcagcgcgcgcgcagcctccatgcccttctcccacgcagacacgatcggcacactcagcgggttcatcaccgtaatttcactttccgcttcgctgggctcttcctcttcctcttgcgtccgcataccacgcgccactgggtcgtcttcattcagccgccgcactgtgcgcttacctcctttgccatgcttgattagcaccggtgggttgctgaaacccaccatttgtagcgccacatcttctctttcttcctcgctgtccacgattacctctggtgatggcgggcgctcgggcttgggagaagggcgcttctttttcttcttgggcgcaatggccaaatccgccgccgaggtcgatggccgcgggctgggtgtgcgcggcaccagcgcgtcttgtgatgagtcttcctcgtcctcggactcgatacgccgcctcatccgcttttttgggggcgcccggggaggcggcggcgacggggacggggacgacacgtcctccatggttgggggacgtcgcgccgcaccgcgtccgcgctcgggggtggtttcgcgctgctcctcttcccgactggccatttccttctcctataggcagaaaaagatcatggagtcagtcgagaagaaggacagcctaaccgccccctctgagttcgccaccaccgcctccaccgatgccgccaacgcgcctaccaccttccccgtcgaggcacccccgcttgaggaggaggaagtgattatcgagcaggacccaggttttgtaagcgaagacgacgaggaccgctcagtaccaacagaggataaaaagcaagaccaggacaacgcagaggcaaacgaggaacaagtcgggcggggggacgaaaggcatggcgactacctagatgtgggagacgacgtgctgttgaagcatctgcagcgccagtgcgccattatctgcgacgcgttgcaagagcgcagcgatgtgcccctcgccatagcggatgtcagccttgcctacgaacgccacctattctcaccgcgcgtaccccccaaacgccaagaaaacggcacatgcgagcccaacccgcgcctcaacttctaccccgtatttgccgtgccagaggtgcttgccacctatcacatctttttccaaaactgcaagatacccctatcctgccgtgccaaccgcagccgagcggacaagcagctggccttgcggcagggcgctgtcatacctgatatcgcctcgctcaacgaagtgccaaaaatctttgagggtcttggacgcgacgagaagcgcgcggcaaacgctctgcaacaggaaaacagcgaaaatgaaagtcactctggagtgttggtggaactcgagggtgacaacgcgcgcctagccgtactaaaacgcagcatcgaggtcacccactttgcctacccggcacttaacctaccccccaaggtcatgagcacagtcatgagtgagctgatcgtgcgccgtgcgcagcccctggagagggatgcaaatttgcaagaacaaacagaggagggcctacccgcagttggcgacgagcagctagcgcgctggcttcaaacgcgcgagcctgccgacttggaggagcgacgcaaactaatgatggccgcagtgctcgttaccgtggagcttgagtgcatgcagcggttctttgctgacccggagatgcagcgcaagctagaggaaacattgcactacacctttcgacagggctacgtacgccaggcctgcaagatctccaacgtggagctctgcaacctggtctcctaccttggaattttgcacgaaaaccgccttgggcaaaacgtgcttcattccacgctcaagggcgaggcgcgccgcgactacgtccgcgactgcgtttacttatttctatgctacacctggcagacggccatgggcgtttggcagcagtgcttggaggagtgcaacctcaaggagctgcagaaactgctaaagcaaaacttgaaggacctatggacggccttcaacgagcgctccgtggccgcgcacctggcggacatcattttccccgaacgcctgcttaaaaccctgcaacagggtctgccagacttcaccagtcaaagcatgttgcagaactttaggaactttatcctagagcgctcaggaatcttgcccgccacctgctgtgcacttcctagcgactttgtgcccattaagtaccgcgaatgccctccgccgctttggggccactgctaccttctgcagctagccaactaccttgcctaccactctgacataatggaagacgtgagcggtgacggtctactggagtgtcactgtcgctgcaacctatgcaccccgcaccgctccctggtttgcaattcgcagctgcttaacgaaagtcaaattatcggtacctttgagctgcagggtccctcgcctgacgaaaagtccgcggctccggggttgaaactcactccggggctgtggacgtcggcttaccttcgcaaatttgtacctgaggactaccacgcccacgagattaggttctacgaagaccaatcccgcccgcctaatgcggagcttaccgcctgcgtcattacccagggccacattcttggccaattgcaagccatcaacaaagcccgccaagagtttctgctacgaaagggacggggggtttacttggacccccagtccggcgaggagctcaacccaatccccccgccgccgcagccctatcagcagcagccgcgggcccttgcttcccaggtgatgacccaaaaagaagctgcagctgccgccgccacccacggacgaggaggaatactgggacagtcaggcagaggaggttttggacgaggaggaggaggacatgatggaagactgggagagcctagacgaggaagcttccgaggtcgaagaggtgtcagacgaaacaccgtcaccctcggtcgcattcccctcgccggcgccccagaaatcggcaaccggttccagcatggctacaacctccgctcctcaggcgccgccggcactgcccgttcgccgacccaaccgtagatgggacaccactggaaccagggccggtaagtccaagcagccgccgccgttagcccaagagcaacaacagcgccaaggctaccgctcatggcgcgggcacaagaacgccatagttgcttgcttgcaagactgtgggggcaacatctccttcgcccgccgctttcttctctaccatcacggcgtggccttcccccgtaacatcctgcattactaccgtcatctctacagcccatactgcaccggcggcagcggcagcaacagcagcggccacacagaagcaaaggcgaccggatagcaagactctgacaaagcccaagaaatccacagcggcggcagcagcaggaggaggagcgctgcgtctggcgcccaacgaacccgtatcgacccgcgagcttagaaacaggatttttcccactctgtatgctatatttcaacagagcaggggccaagaacaagagctgaaaataaaaaacaggtctctgcgatccctcacccgcagctgcctgtatcacaaaagcgaagatcagcttcggcgcacgctggaagacgcggaggctctcttcagtaaatactgcgcgctgactcttaaggactagtttcgcgccctttctcaaatttaagcgcgaaaactacgtca

SEQ ID NO: 25 - DNA, 5505 bp, synthetic construct
  source 1..5505: mol_type = other DNA
ttaaaaatcaaaggggttctgccgcgcatcgctatgcgccactggcagggacacgttgcgatactggtgtttagtgctccacttaaactcaggcacaaccatccgcggcagctcggtgaagttttcactccacaggctgcgcaccatcaccaacgcgtttagcaggtcgggcgccgatatcttgaagtcgcagttggggcctccgccctgcgcgcgcgagttgcgatacacagggttgcagcactggaacactatcagcgccgggtggtgcacgctggccagcacgctcttgtcggagatcagatccgcgtccaggtcctccgcgttgctcagggcgaacggagtcaactttggtagctgccttcccaaaaagggcgcgtgcccaggctttgagttgcactcgcaccgtagtggcatcaaaaggtgaccgtgcccggtctgggcgttaggatacagcgcctgcataaaagccttgatctgcttaaaagccacctgagcctttgcgccttcagagaagaacatgccgcaagacttgccggaaaactgattggccggacaggccgcgtcgtgcacgcagcaccttgcgtcggtgttggagatctgcaccacatttcggccccaccggttcttcacgatcttggccttgctagactgctccttcagcgcgcgctgcccgttttcgctcgtcacatccatttcaatcacgtgctccttatttatcataatgcttccgtgtagacacttaagctcgccttcgatctcagcgcagcggtgcagccacaacgcgcagcccgtgggctcgtgatgcttgtaggtcacctctgcaaacgactgcaggtacgcctgcaggaatcgccccatcatcgtcacaaaggtcttgttgctggtgaaggtcagctgcaacccgcggtgctcctcgttcagccaggtcttgcatacggccgccagagcttccacttggtcaggcagtagtttgaagttcgcctttagatcgttatccacgtggtacttgtccatcagcgcgcgcgcagcctccatgcccttctcccacgcagacacgatcggcacactcagcgggttcatcaccgtaatttcactttccgcttcgctgggctcttcctcttcctcttgcgtccgcataccacgcgccactgggtcgtcttcattcagccgccgcactgtgcgcttacctcctttgccatgcttgattagcaccggtgggttgctgaaacccaccatttgtagcgccacatcttctctttcttcctcgctgtccacgattacctctggtgatggcgggcgctcgggcttgggagaagggcgcttctttttcttcttgggcgcaatggccaaatccgccgccgaggtcgatggccgcgggctgggtgtgcgcggcaccagcgcgtcttgtgatgagtcttcctcgtcctcggactcgatacgccgcctcatccgcttttttgggggcgcccggggaggcggcggcgacggggacggggacgacacgtcctccatggttgggggacgtcgcgccgcaccgcgtccgcgctcgggggtggtttcgcgctgctcctcttcccgactggccatttccttctcctataggcagaaaaagatcgttgaaactcactccggggctgtggacgtcggcttaccttcgcaaatttgtacctgaggactaccacgcccacgagattaggttctacgaagaccaatcccgcccgcctaatgcggagcttaccgcctgcgtcattacccagggccacattcttggccaattgcaagccatcaacaaagcccgccaagagtttctgctacgaaagggacggggggtttacttggacccccagtccggcgaggagctcaacccaatccccccgccgccgcagccctatcagcagcagccgcgggcccttgcttcccaggatggcacccaaaaagaagctgcagctgccgccgccacccacggacgaggaggaatactgggacagtcaggcagaggaggttttggacgaggaggaggaggacatgatggaagactgggagagcctagacgaggaagcttccgaggtcgaagaggtgtcagacgaaacaccgtcaccctcggtcgcattcccctcgccggcgccccagaaatcggcaaccggttccagcatggctacaacctccgctcctcaggcgccgccggcactgcccgttcgccgacccaaccgtagatgggacaccactggaaccagggccggtaagtccaagcagccgccgccgttagcccaagagcaacaacagcgccaaggctaccgctcatggcgcgggcacaagaacgccatagttgcttgcttgcaagactgtgggggcaacatctccttcgcccgccgctttcttctctaccatcacggcgtggccttcccccgtaacatcctgcattactaccgtcatctctacagcccatactgcaccggcggcagcggcagcaacagcagcggccacacagaagcaaaggcgaccggatagcaagactctgacaaagcccaagaaatccacagcggcggcagcagcaggaggaggagcgctgcgtctggcgcccaacgaacccgtatcgacccgcgagcttagaaacaggatttttcccactctgtatgctatatttcaacagagcaggggccaagaacaagagctgaaaataaaaaacaggtctctgcgatccctcacccgcagctgcctgtatcacaaaagcgaagatcagcttcggcgcacgctggaagacgcggaggctctcttcagtaaatactgcgcgctgactcttaaggactagtttcgcgccctttctcaaatttaagcgcgaaaactacgtcatctccagcggccacacccggcgccagcacctgttgtcagcgccattttttagggcggagtaacttgtatgtgttgggaattgtagttttcttaaaatgggaagtgacgtaacgtgggaaaacggaagtgacgatttgaggaagttgtgggttttttggctttcgtttctgggcgtaggttcgcgtgcggttttctgggtgttttttgtggactttaaccgttacgtcattttttagtcctatatatactcgctctgcacttggcccttttttacactgtgactgattgagctggtgccgtgtcgagtggtgtttttttaataggttttcttttttactggtaaggctgactgttatgactacgtccggcgttccatttggcatgacactacgaccaacacgatctcggttgtctcggcgcactccgtacagtagggatcgtctacctccttttgagacagaaacccgcgctaccatactggaggatcatccgctgctgcccgaatgtaacactttgacaatgcacaacgtgagttacgtgcgaggtcttccctgcagtgtgggatttacgctgattcaggaatgggttgttccctgggatatggttctaacgcgggaggagcttgtaatcctgaggaagtgtatgcacgtgtgcctgtgttgtgccaacattgatatcatgacgagcatgatgatccatggttacgagtcctgggctctccactgtcattgttccagtcccggttccctgcagtgtatagccggcgggcaggttttggccagctggtttaggatggtggtggatggcgccatgtttaatcagaggtttatatggtaccgggaggtggtgaattacaacatgccaaaagaggtaatgtttatgtccagcgtgtttatgaggggtcgccacttaatctacctgcgcttgtggtatgatggccacgtgggttctgtggtccccgccatgagctttggatacagcgccttgcactgtgggattttgaacaatattgtggtgctgtgctgcagttactgtgctgatttaagtgagatcagggtgcgctgctgtgcccggaggacaaggcgccttatgctgcgggcggtgcgaatcatcgctgaggagaccactgccatgttgtattcctgcaggacggagcggcggcggcagcagtttattcgcgcgctgctgcagcaccaccgccctatcctgatgcacgattatgactctacccccatgtaggcgtggacttctccttcgccgcccgttaagcaaccgcaagttggacagcagcctgtggctcagcagctggacagcgacatgaacttaagtgagctgcccggggagtttattaatatcactgatgagcgtttggctcgacaggaaaccgtgtggaatataacacctaagaatatgtctgttacccatgatatgatgctttttaaggccagccggggagaaaggactgtgtactctgtgtgttgggagggaggtggcaggttgaatactagggttctgtgagtttgattaaggtacggtgatctgtataagctatgtggtggtggggctatactactgaatgaaaaatgacttgaaattttctgcaattgaaaaataaacacgttgaaacataacacaaacgattctttattcttgggcaatgtatgaaaaagtgtaagaggatgtggcaaatatttcattaatgtagttgtggccagaccagtcccatgaaaatgacatagagtatgcacttggagttgtgtctcctgtttcctgtgtaccgtttagtgtaatggttagtgttacaggtttagttttgtctccgtttaagtaaacttgactgacaatgttacttttggcagttttaccgtgagattttggataagctgataggttaggcataaatccaacagcgtttgtataggctgtcgcccctcctgacgcggtaggaggaggggagggtgccctgcatgtctgccgctgctcttgctcttgccgctgctgaggaggggggcgcatctgccgcagcaccggatgcatctgggaaaagcaaaaaaggggctcgtccctgtttccggaggaatttgcaagcggggtcttgcatgacggggaggcaaacccccgttcgccgcagtccggccggtccgagactcgaaccgggggtcccgcgactcaacccttggaaaataaccctccggctacagggagcgagccacttaatgctttcgctttccagcctaaccgcttacgctgcgcgcggccagtggccaaaaaagctagcgcagcagccgccgcgcctggaaggaagccaaaaggagcactcccccgttgtctgacgtcgcacacctgggttcgacacgcgggcggtaaccgcatggatcacggcggacggccggatacggggctcgaaccccggtcgtccgccatgatacccttgcgaatttatccaccagaccacggaagagtgcccgcttacaggctctccttttgcacggtctagagcgtcaacgattgcgcgcgcctgaccggccagagcgtcccgaccatggagcactttttgccgctgcgcaacatctggaaccgcgtccgcgactttccgcgcgcctccaccaccgccgccggcatcacctggatgtccaggtacatctacggata

SEQ ID NO: 26 - DNA, 5576 bp, synthetic construct
  source 1..5576: mol_type = other DNA
aataaaggcaaatgcttttatttgtacactctcgggtgattatttacccccacccttgccgtctgcgccgtttaaaaatcaaaggggttctgccgcgcatcgctatgcgccactggcagggacacgttgcgatactggtgtttagtgctccacttaaactcaggcacaaccatccgcggcagctcggtgaagttttcactccacaggctgcgcaccatcaccaacgcgtttagcaggtcgggcgccgatatcttgaagtcgcagttggggcctccgccctgcgcgcgcgagttgcgatacacagggttgcagcactggaacactatcagcgccgggtggtgcacgctggccagcacgctcttgtcggagatcagatccgcgtccaggtcctccgcgttgctcagggcgaacggagtcaactttggtagctgccttcccaaaaagggcgcgtgcccaggctttgagttgcactcgcaccgtagtggcatcaaaaggtgaccgtgcccggtctgggcgttaggatacagcgcctgcataaaagccttgatctgcttaaaagccacctgagcctttgcgccttcagagaagaacatgccgcaagacttgccggaaaactgattggccggacaggccgcgtcgtgcacgcagcaccttgcgtcggtgttggagatctgcaccacatttcggccccaccggttcttcacgatcttggccttgctagactgctccttcagcgcgcgctgcccgttttcgctcgtcacatccatttcaatcacgtgctccttatttatcataatgcttccgtgtagacacttaagctcgccttcgatctcagcgcagcggtgcagccacaacgcgcagcccgtgggctcgtgatgcttgtaggtcacctctgcaaacgactgcaggtacgcctgcaggaatcgccccatcatcgtcacaaaggtcttgttgctggtgaaggtcagctgcaacccgcggtgctcctcgttcagccaggtcttgcatacggccgccagagcttccacttggtcaggcagtagtttgaagttcgcctttagatcgttatccacgtggtacttgtccatcagcgcgcgcgcagcctccatgcccttctcccacgcagacacgatcggcacactcagcgggttcatcaccgtaatttcactttccgcttcgctgggctcttcctcttcctcttgcgtccgcataccacgcgccactgggtcgtcttcattcagccgccgcactgtgcgcttacctcctttgccatgcttgattagcaccggtgggttgctgaaacccaccatttgtagcgccacatcttctctttcttcctcgctgtccacgattacctctggtgatggcgggcgctcgggcttgggagaagggcgcttctttttcttcttgggcgcaatggccaaatccgccgccgaggtcgatggccgcgggctgggtgtgcgcggcaccagcgcgtcttgtgatgagtcttcctcgtcctcggactcgatacgccgcctcatccgcttttttgggggcgcccggggaggcggcggcgacggggacggggacgacacgtcctccatggttgggggacgtcgcgccgcaccgcgtccgcgctcgggggtggtttcgcgctgctcctcttcccgactggccatttccttctcctataggcagaaaaagatcgttgaaactcactccggggctgtggacgtcggcttaccttcgcaaatttgtacctgaggactaccacgcccacgagattaggttctacgaagaccaatcccgcccgcctaatgcggagcttaccgcctgcgtcattacccagggccacattcttggccaattgcaagccatcaacaaagcccgccaagagtttctgctacgaaagggacggggggtttacttggacccccagtccggcgaggagctcaacccaatccccccgccgccgcagccctatcagcagcagccgcgggcccttgcttcccaggatggcacccaaaaagaagctgcagctgccgccgccacccacggacgaggaggaatactgggacagtcaggcagaggaggttttggacgaggaggaggaggacatgatggaagactgggagagcctagacgaggaagcttccgaggtcgaagaggtgtcagacgaaacaccgtcaccctcggtcgcattcccctcgccggcgccccagaaatcggcaaccggttccagcatggctacaacctccgctcctcaggcgccgccggcactgcccgttcgccgacccaaccgtagatgggacaccactggaaccagggccggtaagtccaagcagccgccgccgttagcccaagagcaacaacagcgccaaggctaccgctcatggcgcgggcacaagaacgccatagttgcttgcttgcaagactgtgggggcaacatctccttcgcccgccgctttcttctctaccatcacggcgtggccttcccccgtaacatcctgcattactaccgtcatctctacagcccatactgcaccggcggcagcggcagcaacagcagcggccacacagaagcaaaggcgaccggatagcaagactctgacaaagcccaagaaatccacagcggcggcagcagcaggaggaggagcgctgcgtctggcgcccaacgaacccgtatcgacccgcgagcttagaaacaggatttttcccactctgtatgctatatttcaacagagcaggggccaagaacaagagctgaaaataaaaaacaggtctctgcgatccctcacccgcagctgcctgtatcacaaaagcgaagatcagcttcggcgcacgctggaagacgcggaggctctcttcagtaaatactgcgcgctgactcttaaggactagtttcgcgccctttctcaaatttaagcgcgaaaactacgtcatctccagcggccacacccggcgccagcacctgttgtcagcgccattttttagggcggagtaacttgtatgtgttgggaattgtagttttcttaaaatgggaagtgacgtaacgtgggaaaacggaagtgacgatttgaggaagttgtgggttttttggctttcgtttctgggcgtaggttcgcgtgcggttttctgggtgttttttgtggactttaaccgttacgtcattttttagtcctatatatactcgctctgcacttggcccttttttacactgtgactgattgagctggtgccgtgtcgagtggtgtttttttaataggttttcttttttactggtaaggctgactgttatgactacgtccggcgttccatttggcatgacactacgaccaacacgatctcggttgtctcggcgcactccgtacagtagggatcgtctacctccttttgagacagaaacccgcgctaccatactggaggatcatccgctgctgcccgaatgtaacactttgacaatgcacaacgtgagttacgtgcgaggtcttccctgcagtgtgggatttacgctgattcaggaatgggttgttccctgggatatggttctaacgcgggaggagcttgtaatcctgaggaagtgtatgcacgtgtgcctgtgttgtgccaacattgatatcatgacgagcatgatgatccatggttacgagtcctgggctctccactgtcattgttccagtcccggttccctgcagtgtatagccggcgggcaggttttggccagctggtttaggatggtggtggatggcgccatgtttaatcagaggtttatatggtaccgggaggtggtgaattacaacatgccaaaagaggtaatgtttatgtccagcgtgtttatgaggggtcgccacttaatctacctgcgcttgtggtatgatggccacgtgggttctgtggtccccgccatgagctttggatacagcgccttgcactgtgggattttgaacaatattgtggtgctgtgctgcagttactgtgctgatttaagtgagatcagggtgcgctgctgtgcccggaggacaaggcgccttatgctgcgggcggtgcgaatcatcgctgaggagaccactgccatgttgtattcctgcaggacggagcggcggcggcagcagtttattcgcgcgctgctgcagcaccaccgccctatcctgatgcacgattatgactctacccccatgtaggcgtggacttctccttcgccgcccgttaagcaaccgcaagttggacagcagcctgtggctcagcagctggacagcgacatgaacttaagtgagctgcccggggagtttattaatatcactgatgagcgtttggctcgacaggaaaccgtgtggaatataacacctaagaatatgtctgttacccatgatatgatgctttttaaggccagccggggagaaaggactgtgtactctgtgtgttgggagggaggtggcaggttgaatactagggttctgtgagtttgattaaggtacggtgatctgtataagctatgtggtggtggggctatactactgaatgaaaaatgacttgaaattttctgcaattgaaaaataaacacgttgaaacataacacaaacgattctttattcttgggcaatgtatgaaaaagtgtaagaggatgtggcaaatatttcattaatgtagttgtggccagaccagtcccatgaaaatgacatagagtatgcacttggagttgtgtctcctgtttcctgtgtaccgtttagtgtaatggttagtgttacaggtttagttttgtctccgtttaagtaaacttgactgacaatgttacttttggcagttttaccgtgagattttggataagctgataggttaggcataaatccaacagcgtttgtataggctgtcgcccctcctgacgcggtaggaggaggggagggtgccctgcatgtctgccgctgctcttgctcttgccgctgctgaggaggggggcgcatctgccgcagcaccggatgcatctgggaaaagcaaaaaaggggctcgtccctgtttccggaggaatttgcaagcggggtcttgcatgacggggaggcaaacccccgttcgccgcagtccggccggtccgagactcgaaccgggggtcccgcgactcaacccttggaaaataaccctccggctacagggagcgagccacttaatgctttcgctttccagcctaaccgcttacgctgcgcgcggccagtggccaaaaaagctagcgcagcagccgccgcgcctggaaggaagccaaaaggagcactcccccgttgtctgacgtcgcacacctgggttcgacacgcgggcggtaaccgcatggatcacggcggacggccggatacggggctcgaaccccggtcgtccgccatgatacccttgcgaatttatccaccagaccacggaagagtgcccgcttacaggctctccttttgcacggtctagagcgtcaacgattgcgcgcgcctgaccggccagagcgtcccgaccatggagcactttttgccgctgcgcaacatctggaaccgcgtccgcgactttccgcgcgcctccaccaccgccgccggcatcacctggatgtccaggtacatctacggata

SEQ ID NO: 27 - DNA, 5505 bp, synthetic construct
  source 1..5505: mol_type = other DNA
ttaaaaatcaaaggggttctgccgcgcatcgctatgcgccactggcagggacacgttgcgatactggtgtttagtgctccacttaaactcaggcacaaccatccgcggcagctcggtgaagttttcactccacaggctgcgcaccatcaccaacgcgtttagcaggtcgggcgccgatatcttgaagtcgcagttggggcctccgccctgcgcgcgcgagttgcgatacacagggttgcagcactggaacactatcagcgccgggtggtgcacgctggccagcacgctcttgtcggagatcagatccgcgtccaggtcctccgcgttgctcagggcgaacggagtcaactttggtagctgccttcccaaaaagggcgcgtgcccaggctttgagttgcactcgcaccgtagtggcatcaaaaggtgaccgtgcccggtctgggcgttaggatacagcgcctgcataaaagccttgatctgcttaaaagccacctgagcctttgcgccttcagagaagaacatgccgcaagacttgccggaaaactgattggccggacaggccgcgtcgtgcacgcagcaccttgcgtcggtgttggagatctgcaccacatttcggccccaccggttcttcacgatcttggccttgctagactgctccttcagcgcgcgctgcccgttttcgctcgtcacatccatttcaatcacgtgctccttatttatcataatgcttccgtgtagacacttaagctcgccttcgatctcagcgcagcggtgcagccacaacgcgcagcccgtgggctcgtgatgcttgtaggtcacctctgcaaacgactgcaggtacgcctgcaggaatcgccccatcatcgtcacaaaggtcttgttgctggtgaaggtcagctgcaacccgcggtgctcctcgttcagccaggtcttgcatacggccgccagagcttccacttggtcaggcagtagtttgaagttcgcctttagatcgttatccacgtggtacttgtccatcagcgcgcgcgcagcctccatgcccttctcccacgcagacacgatcggcacactcagcgggttcatcaccgtaatttcactttccgcttcgctgggctcttcctcttcctcttgcgtccgcataccacgcgccactgggtcgtcttcattcagccgccgcactgtgcgcttacctcctttgccatgcttgattagcaccggtgggttgctgaaacccaccatttgtagcgccacatcttctctttcttcctcgctgtccacgattacctctggtgatggcgggcgctcgggcttgggagaagggcgcttctttttcttcttgggcgcaatggccaaatccgccgccgaggtcgatggccgcgggctgggtgtgcgcggcaccagcgcgtcttgtgatgagtcttcctcgtcctcggactcgatacgccgcctcatccgcttttttgggggcgcccggggaggcggcggcgacggggacggggacgacacgtcctccatggttgggggacgtcgcgccgcaccgcgtccgcgctcgggggtggtttcgcgctgctcctcttcccgactggccatttccttctcctataggcagaaaaagatcgttgaaactcactccggggctgtggacgtcggcttaccttcgcaaatttgtacctgaggactaccacgcccacgagattaggttctacgaagaccaatcccgcccgcctaatgcggagcttaccgcctgcgtcattacccagggccacattcttggccaattgcaagccatcaacaaagcccgccaagagtttctgctacgaaagggacggggggtttacttggacccccagtccggcgaggagctcaacccaatccccccgccgccgcagccctatcagcagcagccgcgggcccttgcttcccaggtgatgacccaaaaagaagctgcagctgccgccgccacccacggacgaggaggaatactgggacagtcaggcagaggaggttttggacgaggaggaggaggacatgatggaagactgggagagcctagacgaggaagcttccgaggtcgaagaggtgtcagacgaaacaccgtcaccctcggtcgcattcccctcgccggcgccccagaaatcggcaaccggttccagcatggctacaacctccgctcctcaggcgccgccggcactgcccgttcgccgacccaaccgtagatgggacaccactggaaccagggccggtaagtccaagcagccgccgccgttagcccaagagcaacaacagcgccaaggctaccgctcatggcgcgggcacaagaacgccatagttgcttgcttgcaagactgtgggggcaacatctccttcgcccgccgctttcttctctaccatcacggcgtggccttcccccgtaacatcctgcattactaccgtcatctctacagcccatactgcaccggcggcagcggcagcaacagcagcggccacacagaagcaaaggcgaccggatagcaagactctgacaaagcccaagaaatccacagcggcggcagcagcaggaggaggagcgctgcgtctggcgcccaacgaacccgtatcgacccgcgagcttagaaacaggatttttcccactctgtatgctatatttcaacagagcaggggccaagaacaagagctgaaaataaaaaacaggtctctgcgatccctcacccgcagctgcctgtatcacaaaagcgaagatcagcttcggcgcacgctggaagacgcggaggctctcttcagtaaatactgcgcgctgactcttaaggactagtttcgcgccctttctcaaatttaagcgcgaaaactacgtcatctccagcggccacacccggcgccagcacctgttgtcagcgccattttttagggcggagtaacttgtatgtgttgggaattgtagttttcttaaaatgggaagtgacgtaacgtgggaaaacggaagtgacgatttgaggaagttgtgggttttttggctttcgtttctgggcgtaggttcgcgtgcggttttctgggtgttttttgtggactttaaccgttacgtcattttttagtcctatatatactcgctctgcacttggcccttttttacactgtgactgattgagctggtgccgtgtcgagtggtgtttttttaataggttttcttttttactggtaaggctgactgttatgactacgtccggcgttccatttggcatgacactacgaccaacacgatctcggttgtctcggcgcactccgtacagtagggatcgtctacctccttttgagacagaaacccgcgctaccatactggaggatcatccgctgctgcccgaatgtaacactttgacaatgcacaacgtgagttacgtgcgaggtcttccctgcagtgtgggatttacgctgattcaggaatgggttgttccctgggatatggttctaacgcgggaggagcttgtaatcctgaggaagtgtatgcacgtgtgcctgtgttgtgccaacattgatatcatgacgagcatgatgatccatggttacgagtcctgggctctccactgtcattgttccagtcccggttccctgcagtgtatagccggcgggcaggttttggccagctggtttaggatggtggtggatggcgccatgtttaatcagaggtttatatggtaccgggaggtggtgaattacaacatgccaaaagaggtaatgtttatgtccagcgtgtttatgaggggtcgccacttaatctacctgcgcttgtggtatgatggccacgtgggttctgtggtccccgccatgagctttggatacagcgccttgcactgtgggattttgaacaatattgtggtgctgtgctgcagttactgtgctgatttaagtgagatcagggtgcgctgctgtgcccggaggacaaggcgccttatgctgcgggcggtgcgaatcatcgctgaggagaccactgccatgttgtattcctgcaggacggagcggcggcggcagcagtttattcgcgcgctgctgcagcaccaccgccctatcctgatgcacgattatgactctacccccatgtaggcgtggacttctccttcgccgcccgttaagcaaccgcaagttggacagcagcctgtggctcagcagctggacagcgacatgaacttaagtgagctgcccggggagtttattaatatcactgatgagcgtttggctcgacaggaaaccgtgtggaatataacacctaagaatatgtctgttacccatgatatgatgctttttaaggccagccggggagaaaggactgtgtactctgtgtgttgggagggaggtggcaggttgaatactagggttctgtgagtttgattaaggtacggtgatctgtataagctatgtggtggtggggctatactactgaatgaaaaatgacttgaaattttctgcaattgaaaaataaacacgttgaaacataacacaaacgattctttattcttgggcaatgtatgaaaaagtgtaagaggatgtggcaaatatttcattaatgtagttgtggccagaccagtcccatgaaaatgacatagagtatgcacttggagttgtgtctcctgtttcctgtgtaccgtttagtgtaatggttagtgttacaggtttagttttgtctccgtttaagtaaacttgactgacaatgttacttttggcagttttaccgtgagattttggataagctgataggttaggcataaatccaacagcgtttgtataggctgtcgcccctcctgacgcggtaggaggaggggagggtgccctgcatgtctgccgctgctcttgctcttgccgctgctgaggaggggggcgcatctgccgcagcaccggatgcatctgggaaaagcaaaaaaggggctcgtccctgtttccggaggaatttgcaagcggggtcttgcatgacggggaggcaaacccccgttcgccgcagtccggccggtccgagactcgaaccgggggtcccgcgactcaacccttggaaaataaccctccggctacagggagcgagccacttaatgctttcgctttccagcctaaccgcttacgctgcgcgcggccagtggccaaaaaagctagcgcagcagccgccgcgcctggaaggaagccaaaaggagcactcccccgttgtctgacgtcgcacacctgggttcgacacgcgggcggtaaccgcatggatcacggcggacggccggatacggggctcgaaccccggtcgtccgccatgatacccttgcgaatttatccaccagaccacggaagagtgcccgcttacaggctctccttttgcacggtctagagcgtcaacgattgcgcgcgcctgaccggccagagcgtcccgaccatggagcactttttgccgctgcgcaacatctggaaccgcgtccgcgactttccgcgcgcctccaccaccgccgccggcatcacctggatgtccaggtacatctacggata

SEQ ID NO: 28 - DNA, 5576 bp, synthetic construct
  source 1..5576: mol_type = other DNA
aataaaggcaaatgcttttatttgtacactctcgggtgattatttacccccacccttgccgtctgcgccgtttaaaaatcaaaggggttctgccgcgcatcgctatgcgccactggcagggacacgttgcgatactggtgtttagtgctccacttaaactcaggcacaaccatccgcggcagctcggtgaagttttcactccacaggctgcgcaccatcaccaacgcgtttagcaggtcgggcgccgatatcttgaagtcgcagttggggcctccgccctgcgcgcgcgagttgcgatacacagggttgcagcactggaacactatcagcgccgggtggtgcacgctggccagcacgctcttgtcggagatcagatccgcgtccaggtcctccgcgttgctcagggcgaacggagtcaactttggtagctgccttcccaaaaagggcgcgtgcccaggctttgagttgcactcgcaccgtagtggcatcaaaaggtgaccgtgcccggtctgggcgttaggatacagcgcctgcataaaagccttgatctgcttaaaagccacctgagcctttgcgccttcagagaagaacatgccgcaagacttgccggaaaactgattggccggacaggccgcgtcgtgcacgcagcaccttgcgtcggtgttggagatctgcaccacatttcggccccaccggttcttcacgatcttggccttgctagactgctccttcagcgcgcgctgcccgttttcgctcgtcacatccatttcaatcacgtgctccttatttatcataatgcttccgtgtagacacttaagctcgccttcgatctcagcgcagcggtgcagccacaacgcgcagcccgtgggctcgtgatgcttgtaggtcacctctgcaaacgactgcaggtacgcctgcaggaatcgccccatcatcgtcacaaaggtcttgttgctggtgaaggtcagctgcaacccgcggtgctcctcgttcagccaggtcttgcatacggccgccagagcttccacttggtcaggcagtagtttgaagttcgcctttagatcgttatccacgtggtacttgtccatcagcgcgcgcgcagcctccatgcccttctcccacgcagacacgatcggcacactcagcgggttcatcaccgtaatttcactttccgcttcgctgggctcttcctcttcctcttgcgtccgcataccacgcgccactgggtcgtcttcattcagccgccgcactgtgcgcttacctcctttgccatgcttgattagcaccggtgggttgctgaaacccaccatttgtagcgccacatcttctctttcttcctcgctgtccacgattacctctggtgatggcgggcgctcgggcttgggagaagggcgcttctttttcttcttgggcgcaatggccaaatccgccgccgaggtcgatggccgcgggctgggtgtgcgcggcaccagcgcgtcttgtgatgagtcttcctcgtcctcggactcgatacgccgcctcatccgcttttttgggggcgcccggggaggcggcggcgacggggacggggacgacacgtcctccatggttgggggacgtcgcgccgcaccgcgtccgcgctcgggggtggtttcgcgctgctcctcttcccgactggccatttccttctcctataggcagaaaaagatcgttgaaactcactccggggctgtggacgtcggcttaccttcgcaaatttgtacctgaggactaccacgcccacgagattaggttctacgaagaccaatcccgcccgcctaatgcggagcttaccgcctgcgtcattacccagggccacattcttggccaattgcaagccatcaacaaagcccgccaagagtttctgctacgaaagggacggggggtttacttggacccccagtccggcgaggagctcaacccaatccccccgccgccgcagccctatcagcagcagccgcgggcccttgcttcccaggtgatgacccaaaaagaagctgcagctgccgccgccacccacggacgaggaggaatactgggacagtcaggcagaggaggttttggacgaggaggaggaggacatgatggaagactgggagagcctagacgaggaagcttccgaggtcgaagaggtgtcagacgaaacaccgtcaccctcggtcgcattcccctcgccggcgccccagaaatcggcaaccggttccagcatggctacaacctccgctcctcaggcgccgccggcactgcccgttcgccgacccaaccgtagatgggacaccactggaaccagggccggtaagtccaagcagccgccgccgttagcccaagagcaacaacagcgccaaggctaccgctcatggcgcgggcacaagaacgccatagttgcttgcttgcaagactgtgggggcaacatctccttcgcccgccgctttcttctctaccatcacggcgtggccttcccccgtaacatcctgcattactaccgtcatctctacagcccatactgcaccggcggcagcggcagcaacagcagcggccacacagaagcaaaggcgaccggatagcaagactctgacaaagcccaagaaatccacagcggcggcagcagcaggaggaggagcgctgcgtctggcgcccaacgaacccgtatcgacccgcgagcttagaaacaggatttttcccactctgtatgctatatttcaacagagcaggggccaagaacaagagctgaaaataaaaaacaggtctctgcgatccctcacccgcagctgcctgtatcacaaaagcgaagatcagcttcggcgcacgctggaagacgcggaggctctcttcagtaaatactgcgcgctgactcttaaggactagtttcgcgccctttctcaaatttaagcgcgaaaactacgtcatctccagcggccacacccggcgccagcacctgttgtcagcgccattttttagggcggagtaacttgtatgtgttgggaattgtagttttcttaaaatgggaagtgacgtaacgtgggaaaacggaagtgacgatttgaggaagttgtgggttttttggctttcgtttctgggcgtaggttcgcgtgcggttttctgggtgttttttgtggactttaaccgttacgtcattttttagtcctatatatactcgctctgcacttggcccttttttacactgtgactgattgagctggtgccgtgtcgagtggtgtttttttaataggttttcttttttactggtaaggctgactgttatgactacgtccggcgttccatttggcatgacactacgaccaacacgatctcggttgtctcggcgcactccgtacagtagggatcgtctacctccttttgagacagaaacccgcgctaccatactggaggatcatccgctgctgcccgaatgtaacactttgacaatgcacaacgtgagttacgtgcgaggtcttccctgcagtgtgggatttacgctgattcaggaatgggttgttccctgggatatggttctaacgcgggaggagcttgtaatcctgaggaagtgtatgcacgtgtgcctgtgttgtgccaacattgatatcatgacgagcatgatgatccatggttacgagtcctgggctctccactgtcattgttccagtcccggttccctgcagtgtatagccggcgggcaggttttggccagctggtttaggatggtggtggatggcgccatgtttaatcagaggtttatatggtaccgggaggtggtgaattacaacatgccaaaagaggtaatgtttatgtccagcgtgtttatgaggggtcgccacttaatctacctgcgcttgtggtatgatggccacgtgggttctgtggtccccgccatgagctttggatacagcgccttgcactgtgggattttgaacaatattgtggtgctgtgctgcagttactgtgctgatttaagtgagatcagggtgcgctgctgtgcccggaggacaaggcgccttatgctgcgggcggtgcgaatcatcgctgaggagaccactgccatgttgtattcctgcaggacggagcggcggcggcagcagtttattcgcgcgctgctgcagcaccaccgccctatcctgatgcacgattatgactctacccccatgtaggcgtggacttctccttcgccgcccgttaagcaaccgcaagttggacagcagcctgtggctcagcagctggacagcgacatgaacttaagtgagctgcccggggagtttattaatatcactgatgagcgtttggctcgacaggaaaccgtgtggaatataacacctaagaatatgtctgttacccatgatatgatgctttttaaggccagccggggagaaaggactgtgtactctgtgtgttgggagggaggtggcaggttgaatactagggttctgtgagtttgattaaggtacggtgatctgtataagctatgtggtggtggggctatactactgaatgaaaaatgacttgaaattttctgcaattgaaaaataaacacgttgaaacataacacaaacgattctttattcttgggcaatgtatgaaaaagtgtaagaggatgtggcaaatatttcattaatgtagttgtggccagaccagtcccatgaaaatgacatagagtatgcacttggagttgtgtctcctgtttcctgtgtaccgtttagtgtaatggttagtgttacaggtttagttttgtctccgtttaagtaaacttgactgacaatgttacttttggcagttttaccgtgagattttggataagctgataggttaggcataaatccaacagcgtttgtataggctgtcgcccctcctgacgcggtaggaggaggggagggtgccctgcatgtctgccgctgctcttgctcttgccgctgctgaggaggggggcgcatctgccgcagcaccggatgcatctgggaaaagcaaaaaaggggctcgtccctgtttccggaggaatttgcaagcggggtcttgcatgacggggaggcaaacccccgttcgccgcagtccggccggtccgagactcgaaccgggggtcccgcgactcaacccttggaaaataaccctccggctacagggagcgagccacttaatgctttcgctttccagcctaaccgcttacgctgcgcgcggccagtggccaaaaaagctagcgcagcagccgccgcgcctggaaggaagccaaaaggagcactcccccgttgtctgacgtcgcacacctgggttcgacacgcgggcggtaaccgcatggatcacggcggacggccggatacggggctcgaaccccggtcgtccgccatgatacccttgcgaatttatccaccagaccacggaagagtgcccgcttacaggctctccttttgcacggtctagagcgtcaacgattgcgcgcgcctgaccggccagagcgtcccgaccatggagcactttttgccgctgcgcaacatctggaaccgcgtccgcgactttccgcgcgcctccaccaccgccgccggcatcacctggatgtccaggtacatctacggata

SEQ ID NO: 29 - DNA, 7331 bp, synthetic construct
  source 1..7331: mol_type = other DNA
ttaaaaatcaaaggggttctgccgcgcatcgctatgcgccactggcagggacacgttgcgatactggtgtttagtgctccacttaaactcaggcacaaccatccgcggcagctcggtgaagttttcactccacaggctgcgcaccatcaccaacgcgtttagcaggtcgggcgccgatatcttgaagtcgcagttggggcctccgccctgcgcgcgcgagttgcgatacacagggttgcagcactggaacactatcagcgccgggtggtgcacgctggccagcacgctcttgtcggagatcagatccgcgtccaggtcctccgcgttgctcagggcgaacggagtcaactttggtagctgccttcccaaaaagggcgcgtgcccaggctttgagttgcactcgcaccgtagtggcatcaaaaggtgaccgtgcccggtctgggcgttaggatacagcgcctgcataaaagccttgatctgcttaaaagccacctgagcctttgcgccttcagagaagaacatgccgcaagacttgccggaaaactgattggccggacaggccgcgtcgtgcacgcagcaccttgcgtcggtgttggagatctgcaccacatttcggccccaccggttcttcacgatcttggccttgctagactgctccttcagcgcgcgctgcccgttttcgctcgtcacatccatttcaatcacgtgctccttatttatcataatgcttccgtgtagacacttaagctcgccttcgatctcagcgcagcggtgcagccacaacgcgcagcccgtgggctcgtgatgcttgtaggtcacctctgcaaacgactgcaggtacgcctgcaggaatcgccccatcatcgtcacaaaggtcttgttgctggtgaaggtcagctgcaacccgcggtgctcctcgttcagccaggtcttgcatacggccgccagagcttccacttggtcaggcagtagtttgaagttcgcctttagatcgttatccacgtggtacttgtccatcagcgcgcgcgcagcctccatgcccttctcccacgcagacacgatcggcacactcagcgggttcatcaccgtaatttcactttccgcttcgctgggctcttcctcttcctcttgcgtccgcataccacgcgccactgggtcgtcttcattcagccgccgcactgtgcgcttacctcctttgccatgcttgattagcaccggtgggttgctgaaacccaccatttgtagcgccacatcttctctttcttcctcgctgtccacgattacctctggtgatggcgggcgctcgggcttgggagaagggcgcttctttttcttcttgggcgcaatggccaaatccgccgccgaggtcgatggccgcgggctgggtgtgcgcggcaccagcgcgtcttgtgatgagtcttcctcgtcctcggactcgatacgccgcctcatccgcttttttgggggcgcccggggaggcggcggcgacggggacggggacgacacgtcctccatggttgggggacgtcgcgccgcaccgcgtccgcgctcgggggtggtttcgcgctgctcctcttcccgactggccatttccttctcctataggcagaaaaagatcatggagtcagtcgagaagaaggacagcctaaccgccccctctgagttcgccaccaccgcctccaccgatgccgccaacgcgcctaccaccttccccgtcgaggcacccccgcttgaggaggaggaagtgattatcgagcaggacccaggttttgtaagcgaagacgacgaggaccgctcagtaccaacagaggataaaaagcaagaccaggacaacgcagaggcaaacgaggaacaagtcgggcggggggacgaaaggcatggcgactacctagatgtgggagacgacgtgctgttgaagcatctgcagcgccagtgcgccattatctgcgacgcgttgcaagagcgcagcgatgtgcccctcgccatagcggatgtcagccttgcctacgaacgccacctattctcaccgcgcgtaccccccaaacgccaagaaaacggcacatgcgagcccaacccgcgcctcaacttctaccccgtatttgccgtgccagaggtgcttgccacctatcacatctttttccaaaactgcaagatacccctatcctgccgtgccaaccgcagccgagcggacaagcagctggccttgcggcagggcgctgtcatacctgatatcgcctcgctcaacgaagtgccaaaaatctttgagggtcttggacgcgacgagaagcgcgcggcaaacgctctgcaacaggaaaacagcgaaaatgaaagtcactctggagtgttggtggaactcgagggtgacaacgcgcgcctagccgtactaaaacgcagcatcgaggtcacccactttgcctacccggcacttaacctaccccccaaggtcatgagcacagtcatgagtgagctgatcgtgcgccgtgcgcagcccctggagagggatgcaaatttgcaagaacaaacagaggagggcctacccgcagttggcgacgagcagctagcgcgctggcttcaaacgcgcgagcctgccgacttggaggagcgacgcaaactaatgatggccgcagtgctcgttaccgtggagcttgagtgcatgcagcggttctttgctgacccggagatgcagcgcaagctagaggaaacattgcactacacctttcgacagggctacgtacgccaggcctgcaagatctccaacgtggagctctgcaacctggtctcctaccttggaattttgcacgaaaaccgccttgggcaaaacgtgcttcattccacgctcaagggcgaggcgcgccgcgactacgtccgcgactgcgtttacttatttctatgctacacctggcagacggccatgggcgtttggcagcagtgcttggaggagtgcaacctcaaggagctgcagaaactgctaaagcaaaacttgaaggacctatggacggccttcaacgagcgctccgtggccgcgcacctggcggacatcattttccccgaacgcctgcttaaaaccctgcaacagggtctgccagacttcaccagtcaaagcatgttgcagaactttaggaactttatcctagagcgctcaggaatcttgcccgccacctgctgtgcacttcctagcgactttgtgcccattaagtaccgcgaatgccctccgccgctttggggccactgctaccttctgcagctagccaactaccttgcctaccactctgacataatggaagacgtgagcggtgacggtctactggagtgtcactgtcgctgcaacctatgcaccccgcaccgctccctggtttgcaattcgcagctgcttaacgaaagtcaaattatcggtacctttgagctgcagggtccctcgcctgacgaaaagtccgcggctccggggttgaaactcactccggggctgtggacgtcggcttaccttcgcaaatttgtacctgaggactaccacgcccacgagattaggttctacgaagaccaatcccgcccgcctaatgcggagcttaccgcctgcgtcattacccagggccacattcttggccaattgcaagccatcaacaaagcccgccaagagtttctgctacgaaagggacggggggtttacttggacccccagtccggcgaggagctcaacccaatccccccgccgccgcagccctatcagcagcagccgcgggcccttgcttcccaggtgatgacccaaaaagaagctgcagctgccgccgccacccacggacgaggaggaatactgggacagtcaggcagaggaggttttggacgaggaggaggaggacatgatggaagactgggagagcctagacgaggaagcttccgaggtcgaagaggtgtcagacgaaacaccgtcaccctcggtcgcattcccctcgccggcgccccagaaatcggcaaccggttccagcatggctacaacctccgctcctcaggcgccgccggcactgcccgttcgccgacccaaccgtagatgggacaccactggaaccagggccggtaagtccaagcagccgccgccgttagcccaagagcaacaacagcgccaaggctaccgctcatggcgcgggcacaagaacgccatagttgcttgcttgcaagactgtgggggcaacatctccttcgcccgccgctttcttctctaccatcacggcgtggccttcccccgtaacatcctgcattactaccgtcatctctacagcccatactgcaccggcggcagcggcagcaacagcagcggccacacagaagcaaaggcgaccggatagcaagactctgacaaagcccaagaaatccacagcggcggcagcagcaggaggaggagcgctgcgtctggcgcccaacgaacccgtatcgacccgcgagcttagaaacaggatttttcccactctgtatgctatatttcaacagagcaggggccaagaacaagagctgaaaataaaaaacaggtctctgcgatccctcacccgcagctgcctgtatcacaaaagcgaagatcagcttcggcgcacgctggaagacgcggaggctctcttcagtaaatactgcgcgctgactcttaaggactagtttcgcgccctttctcaaatttaagcgcgaaaactacgtcatctccagcggccacacccggcgccagcacctgttgtcagcgccattttttagggcggagtaacttgtatgtgttgggaattgtagttttcttaaaatgggaagtgacgtaacgtgggaaaacggaagtgacgatttgaggaagttgtgggttttttggctttcgtttctgggcgtaggttcgcgtgcggttttctgggtgttttttgtggactttaaccgttacgtcattttttagtcctatatatactcgctctgcacttggcccttttttacactgtgactgattgagctggtgccgtgtcgagtggtgtttttttaataggttttcttttttactggtaaggctgactgttatgactacgtccggcgttccatttggcatgacactacgaccaacacgatctcggttgtctcggcgcactccgtacagtagggatcgtctacctccttttgagacagaaacccgcgctaccatactggaggatcatccgctgctgcccgaatgtaacactttgacaatgcacaacgtgagttacgtgcgaggtcttccctgcagtgtgggatttacgctgattcaggaatgggttgttccctgggatatggttctaacgcgggaggagcttgtaatcctgaggaagtgtatgcacgtgtgcctgtgttgtgccaacattgatatcatgacgagcatgatgatccatggttacgagtcctgggctctccactgtcattgttccagtcccggttccctgcagtgtatagccggcgggcaggttttggccagctggtttaggatggtggtggatggcgccatgtttaatcagaggtttatatggtaccgggaggtggtgaattacaacatgccaaaagaggtaatgtttatgtccagcgtgtttatgaggggtcgccacttaatctacctgcgcttgtggtatgatggccacgtgggttctgtggtccccgccatgagctttggatacagcgccttgcactgtgggattttgaacaatattgtggtgctgtgctgcagttactgtgctgatttaagtgagatcagggtgcgctgctgtgcccggaggacaaggcgccttatgctgcgggcggtgcgaatcatcgctgaggagaccactgccatgttgtattcctgcaggacggagcggcggcggcagcagtttattcgcgcgctgctgcagcaccaccgccctatcctgatgcacgattatgactctacccccatgtaggcgtggacttctccttcgccgcccgttaagcaaccgcaagttggacagcagcctgtggctcagcagctggacagcgacatgaacttaagtgagctgcccggggagtttattaatatcactgatgagcgtttggctcgacaggaaaccgtgtggaatataacacctaagaatatgtctgttacccatgatatgatgctttttaaggccagccggggagaaaggactgtgtactctgtgtgttgggagggaggtggcaggttgaatactagggttctgtgagtttgattaaggtacggtgatctgtataagctatgtggtggtggggctatactactgaatgaaaaatgacttgaaattttctgcaattgaaaaataaacacgttgaaacataacacaaacgattctttattcttgggcaatgtatgaaaaagtgtaagaggatgtggcaaatatttcattaatgtagttgtggccagaccagtcccatgaaaatgacatagagtatgcacttggagttgtgtctcctgtttcctgtgtaccgtttagtgtaatggttagtgttacaggtttagttttgtctccgtttaagtaaacttgactgacaatgttacttttggcagttttaccgtgagattttggataagctgataggttaggcataaatccaacagcgtttgtataggctgtcgcccctcctgacgcggtaggaggaggggagggtgccctgcatgtctgccgctgctcttgctcttgccgctgctgaggaggggggcgcatctgccgcagcaccggatgcatctgggaaaagcaaaaaaggggctcgtccctgtttccggaggaatttgcaagcggggtcttgcatgacggggaggcaaacccccgttcgccgcagtccggccggtccgagactcgaaccgggggtcccgcgactcaacccttggaaaataaccctccggctacagggagcgagccacttaatgctttcgctttccagcctaaccgcttacgctgcgcgcggccagtggccaaaaaagctagcgcagcagccgccgcgcctggaaggaagccaaaaggagcactcccccgttgtctgacgtcgcacacctgggttcgacacgcgggcggtaaccgcatggatcacggcggacggccggatacggggctcgaaccccggtcgtccgccatgatacccttgcgaatttatccaccagaccacggaagagtgcccgcttacaggctctccttttgcacggtctagagcgtcaacgattgcgcgcgcctgaccggccagagcgtcccgaccatggagcactttttgccgctgcgcaacatctggaaccgcgtccgcgactttccgcgcgcctccaccaccgccgccggcatcacctggatgtccaggtacatctacggata

SEQ ID NO: 30 - DNA, 7402 bp, synthetic construct
  source 1..7402: mol_type = other DNA
aataaaggcaaatgcttttatttgtacactctcgggtgattatttacccccacccttgccgtctgcgccgtttaaaaatcaaaggggttctgccgcgcatcgctatgcgccactggcagggacacgttgcgatactggtgtttagtgctccacttaaactcaggcacaaccatccgcggcagctcggtgaagttttcactccacaggctgcgcaccatcaccaacgcgtttagcaggtcgggcgccgatatcttgaagtcgcagttggggcctccgccctgcgcgcgcgagttgcgatacacagggttgcagcactggaacactatcagcgccgggtggtgcacgctggccagcacgctcttgtcggagatcagatccgcgtccaggtcctccgcgttgctcagggcgaacggagtcaactttggtagctgccttcccaaaaagggcgcgtgcccaggctttgagttgcactcgcaccgtagtggcatcaaaaggtgaccgtgcccggtctgggcgttaggatacagcgcctgcataaaagccttgatctgcttaaaagccacctgagcctttgcgccttcagagaagaacatgccgcaagacttgccggaaaactgattggccggacaggccgcgtcgtgcacgcagcaccttgcgtcggtgttggagatctgcaccacatttcggccccaccggttcttcacgatcttggccttgctagactgctccttcagcgcgcgctgcccgttttcgctcgtcacatccatttcaatcacgtgctccttatttatcataatgcttccgtgtagacacttaagctcgccttcgatctcagcgcagcggtgcagccacaacgcgcagcccgtgggctcgtgatgcttgtaggtcacctctgcaaacgactgcaggtacgcctgcaggaatcgccccatcatcgtcacaaaggtcttgttgctggtgaaggtcagctgcaacccgcggtgctcctcgttcagccaggtcttgcatacggccgccagagcttccacttggtcaggcagtagtttgaagttcgcctttagatcgttatccacgtggtacttgtccatcagcgcgcgcgcagcctccatgcccttctcccacgcagacacgatcggcacactcagcgggttcatcaccgtaatttcactttccgcttcgctgggctcttcctcttcctcttgcgtccgcataccacgcgccactgggtcgtcttcattcagccgccgcactgtgcgcttacctcctttgccatgcttgattagcaccggtgggttgctgaaacccaccatttgtagcgccacatcttctctttcttcctcgctgtccacgattacctctggtgatggcgggcgctcgggcttgggagaagggcgcttctttttcttcttgggcgcaatggccaaatccgccgccgaggtcgatggccgcgggctgggtgtgcgcggcaccagcgcgtcttgtgatgagtcttcctcgtcctcggactcgatacgccgcctcatccgcttttttgggggcgcccggggaggcggcggcgacggggacggggacgacacgtcctccatggttgggggacgtcgcgccgcaccgcgtccgcgctcgggggtggtttcgcgctgctcctcttcccgactggccatttccttctcctataggcagaaaaagatcatggagtcagtcgagaagaaggacagcctaaccgccccctctgagttcgccaccaccgcctccaccgatgccgccaacgcgcctaccaccttccccgtcgaggcacccccgcttgaggaggaggaagtgattatcgagcaggacccaggttttgtaagcgaagacgacgaggaccgctcagtaccaacagaggataaaaagcaagaccaggacaacgcagaggcaaacgaggaacaagtcgggcggggggacgaaaggcatggcgactacctagatgtgggagacgacgtgctgttgaagcatctgcagcgccagtgcgccattatctgcgacgcgttgcaagagcgcagcgatgtgcccctcgccatagcggatgtcagccttgcctacgaacgccacctattctcaccgcgcgtaccccccaaacgccaagaaaacggcacatgcgagcccaacccgcgcctcaacttctaccccgtatttgccgtgccagaggtgcttgccacctatcacatctttttccaaaactgcaagatacccctatcctgccgtgccaaccgcagccgagcggacaagcagctggccttgcggcagggcgctgtcatacctgatatcgcctcgctcaacgaagtgccaaaaatctttgagggtcttggacgcgacgagaagcgcgcggcaaacgctctgcaacaggaaaacagcgaaaatgaaagtcactctggagtgttggtggaactcgagggtgacaacgcgcgcctagccgtactaaaacgcagcatcgaggtcacccactttgcctacccggcacttaacctaccccccaaggtcatgagcacagtcatgagtgagctgatcgtgcgccgtgcgcagcccctggagagggatgcaaatttgcaagaacaaacagaggagggcctacccgcagttggcgacgagcagctagcgcgctggcttcaaacgcgcgagcctgccgacttggaggagcgacgcaaactaatgatggccgcagtgctcgttaccgtggagcttgagtgcatgcagcggttctttgctgacccggagatgcagcgcaagctagaggaaacattgcactacacctttcgacagggctacgtacgccaggcctgcaagatctccaacgtggagctctgcaacctggtctcctaccttggaattttgcacgaaaaccgccttgggcaaaacgtgcttcattccacgctcaagggcgaggcgcgccgcgactacgtccgcgactgcgtttacttatttctatgctacacctggcagacggccatgggcgtttggcagcagtgcttggaggagtgcaacctcaaggagctgcagaaactgctaaagcaaaacttgaaggacctatggacggccttcaacgagcgctccgtggccgcgcacctggcggacatcattttccccgaacgcctgcttaaaaccctgcaacagggtctgccagacttcaccagtcaaagcatgttgcagaactttaggaactttatcctagagcgctcaggaatcttgcccgccacctgctgtgcacttcctagcgactttgtgcccattaagtaccgcgaatgccctccgccgctttggggccactgctaccttctgcagctagccaactaccttgcctaccactctgacataatggaagacgtgagcggtgacggtctactggagtgtcactgtcgctgcaacctatgcaccccgcaccgctccctggtttgcaattcgcagctgcttaacgaaagtcaaattatcggtacctttgagctgcagggtccctcgcctgacgaaaagtccgcggctccggggttgaaactcactccggggctgtggacgtcggcttaccttcgcaaatttgtacctgaggactaccacgcccacgagattaggttctacgaagaccaatcccgcccgcctaatgcggagcttaccgcctgcgtcattacccagggccacattcttggccaattgcaagccatcaacaaagcccgccaagagtttctgctacgaaagggacggggggtttacttggacccccagtccggcgaggagctcaacccaatccccccgccgccgcagccctatcagcagcagccgcgggcccttgcttcccaggtgatgacccaaaaagaagctgcagctgccgccgccacccacggacgaggaggaatactgggacagtcaggcagaggaggttttggacgaggaggaggaggacatgatggaagactgggagagcctagacgaggaagcttccgaggtcgaagaggtgtcagacgaaacaccgtcaccctcggtcgcattcccctcgccggcgccccagaaatcggcaaccggttccagcatggctacaacctccgctcctcaggcgccgccggcactgcccgttcgccgacccaaccgtagatgggacaccactggaaccagggccggtaagtccaagcagccgccgccgttagcccaagagcaacaacagcgccaaggctaccgctcatggcgcgggcacaagaacgccatagttgcttgcttgcaagactgtgggggcaacatctccttcgcccgccgctttcttctctaccatcacggcgtggccttcccccgtaacatcctgcattactaccgtcatctctacagcccatactgcaccggcggcagcggcagcaacagcagcggccacacagaagcaaaggcgaccggatagcaagactctgacaaagcccaagaaatccacagcggcggcagcagcaggaggaggagcgctgcgtctggcgcccaacgaacccgtatcgacccgcgagcttagaaacaggatttttcccactctgtatgctatatttcaacagagcaggggccaagaacaagagctgaaaataaaaaacaggtctctgcgatccctcacccgcagctgcctgtatcacaaaagcgaagatcagcttcggcgcacgctggaagacgcggaggctctcttcagtaaatactgcgcgctgactcttaaggactagtttcgcgccctttctcaaatttaagcgcgaaaactacgtcatctccagcggccacacccggcgccagcacctgttgtcagcgccattttttagggcggagtaacttgtatgtgttgggaattgtagttttcttaaaatgggaagtgacgtaacgtgggaaaacggaagtgacgatttgaggaagttgtgggttttttggctttcgtttctgggcgtaggttcgcgtgcggttttctgggtgttttttgtggactttaaccgttacgtcattttttagtcctatatatactcgctctgcacttggcccttttttacactgtgactgattgagctggtgccgtgtcgagtggtgtttttttaataggttttcttttttactggtaaggctgactgttatgactacgtccggcgttccatttggcatgacactacgaccaacacgatctcggttgtctcggcgcactccgtacagtagggatcgtctacctccttttgagacagaaacccgcgctaccatactggaggatcatccgctgctgcccgaatgtaacactttgacaatgcacaacgtgagttacgtgcgaggtcttccctgcagtgtgggatttacgctgattcaggaatgggttgttccctgggatatggttctaacgcgggaggagcttgtaatcctgaggaagtgtatgcacgtgtgcctgtgttgtgccaacattgatatcatgacgagcatgatgatccatggttacgagtcctgggctctccactgtcattgttccagtcccggttccctgcagtgtatagccggcgggcaggttttggccagctggtttaggatggtggtggatggcgccatgtttaatcagaggtttatatggtaccgggaggtggtgaattacaacatgccaaaagaggtaatgtttatgtccagcgtgtttatgaggggtcgccacttaatctacctgcgcttgtggtatgatggccacgtgggttctgtggtccccgccatgagctttggatacagcgccttgcactgtgggattttgaacaatattgtggtgctgtgctgcagttactgtgctgatttaagtgagatcagggtgcgctgctgtgcccggaggacaaggcgccttatgctgcgggcggtgcgaatcatcgctgaggagaccactgccatgttgtattcctgcaggacggagcggcggcggcagcagtttattcgcgcgctgctgcagcaccaccgccctatcctgatgcacgattatgactctacccccatgtaggcgtggacttctccttcgccgcccgttaagcaaccgcaagttggacagcagcctgtggctcagcagctggacagcgacatgaacttaagtgagctgcccggggagtttattaatatcactgatgagcgtttggctcgacaggaaaccgtgtggaatataacacctaagaatatgtctgttacccatgatatgatgctttttaaggccagccggggagaaaggactgtgtactctgtgtgttgggagggaggtggcaggttgaatactagggttctgtgagtttgattaaggtacggtgatctgtataagctatgtggtggtggggctatactactgaatgaaaaatgacttgaaattttctgcaattgaaaaataaacacgttgaaacataacacaaacgattctttattcttgggcaatgtatgaaaaagtgtaagaggatgtggcaaatatttcattaatgtagttgtggccagaccagtcccatgaaaatgacatagagtatgcacttggagttgtgtctcctgtttcctgtgtaccgtttagtgtaatggttagtgttacaggtttagttttgtctccgtttaagtaaacttgactgacaatgttacttttggcagttttaccgtgagattttggataagctgataggttaggcataaatccaacagcgtttgtataggctgtcgcccctcctgacgcggtaggaggaggggagggtgccctgcatgtctgccgctgctcttgctcttgccgctgctgaggaggggggcgcatctgccgcagcaccggatgcatctgggaaaagcaaaaaaggggctcgtccctgtttccggaggaatttgcaagcggggtcttgcatgacggggaggcaaacccccgttcgccgcagtccggccggtccgagactcgaaccgggggtcccgcgactcaacccttggaaaataaccctccggctacagggagcgagccacttaatgctttcgctttccagcctaaccgcttacgctgcgcgcggccagtggccaaaaaagctagcgcagcagccgccgcgcctggaaggaagccaaaaggagcactcccccgttgtctgacgtcgcacacctgggttcgacacgcgggcggtaaccgcatggatcacggcggacggccggatacggggctcgaaccccggtcgtccgccatgatacccttgcgaatttatccaccagaccacggaagagtgcccgcttacaggctctccttttgcacggtctagagcgtcaacgattgcgcgcgcctgaccggccagagcgtcccgaccatggagcactttttgccgctgcgcaacatctggaaccgcgtccgcgactttccgcgcgcctccaccaccgccgccggcatcacctggatgtccaggtacatctacggata

SEQ ID NO: 31 - DNA, 7331 bp, synthetic construct
  source 1..7331: mol_type = other DNA
ttaaaaatcaaaggggttctgccgcgcatcgctatgcgccactggcagggacacgttgcgatactggtgtttagtgctccacttaaactcaggcacaaccatccgcggcagctcggtgaagttttcactccacaggctgcgcaccatcaccaacgcgtttagcaggtcgggcgccgatatcttgaagtcgcagttggggcctccgccctgcgcgcgcgagttgcgatacacagggttgcagcactggaacactatcagcgccgggtggtgcacgctggccagcacgctcttgtcggagatcagatccgcgtccaggtcctccgcgttgctcagggcgaacggagtcaactttggtagctgccttcccaaaaagggcgcgtgcccaggctttgagttgcactcgcaccgtagtggcatcaaaaggtgaccgtgcccggtctgggcgttaggatacagcgcctgcataaaagccttgatctgcttaaaagccacctgagcctttgcgccttcagagaagaacatgccgcaagacttgccggaaaactgattggccggacaggccgcgtcgtgcacgcagcaccttgcgtcggtgttggagatctgcaccacatttcggccccaccggttcttcacgatcttggccttgctagactgctccttcagcgcgcgctgcccgttttcgctcgtcacatccatttcaatcacgtgctccttatttatcataatgcttccgtgtagacacttaagctcgccttcgatctcagcgcagcggtgcagccacaacgcgcagcccgtgggctcgtgatgcttgtaggtcacctctgcaaacgactgcaggtacgcctgcaggaatcgccccatcatcgtcacaaaggtcttgttgctggtgaaggtcagctgcaacccgcggtgctcctcgttcagccaggtcttgcatacggccgccagagcttccacttggtcaggcagtagtttgaagttcgcctttagatcgttatccacgtggtacttgtccatcagcgcgcgcgcagcctccatgcccttctcccacgcagacacgatcggcacactcagcgggttcatcaccgtaatttcactttccgcttcgctgggctcttcctcttcctcttgcgtccgcataccacgcgccactgggtcgtcttcattcagccgccgcactgtgcgcttacctcctttgccatgcttgattagcaccggtgggttgctgaaacccaccatttgtagcgccacatcttctctttcttcctcgctgtccacgattacctctggtgatggcgggcgctcgggcttgggagaagggcgcttctttttcttcttgggcgcaatggccaaatccgccgccgaggtcgatggccgcgggctgggtgtgcgcggcaccagcgcgtcttgtgatgagtcttcctcgtcctcggactcgatacgccgcctcatccgcttttttgggggcgcccggggaggcggcggcgacggggacggggacgacacgtcctccatggttgggggacgtcgcgccgcaccgcgtccgcgctcgggggtggtttcgcgctgctcctcttcccgactggccatttccttctcctataggcagaaaaagatctgatgatcagtcgagaagaaggacagcctaaccgccccctctgagttcgccaccaccgcctccaccgatgccgccaacgcgcctaccaccttccccgtcgaggcacccccgcttgaggaggaggaagtgattatcgagcaggacccaggttttgtaagcgaagacgacgaggaccgctcagtaccaacagaggataaaaagcaagaccaggacaacgcagaggcaaacgaggaacaagtcgggcggggggacgaaaggcatggcgactacctagatgtgggagacgacgtgctgttgaagcatctgcagcgccagtgcgccattatctgcgacgcgttgcaagagcgcagcgatgtgcccctcgccatagcggatgtcagccttgcctacgaacgccacctattctcaccgcgcgtaccccccaaacgccaagaaaacggcacatgcgagcccaacccgcgcctcaacttctaccccgtatttgccgtgccagaggtgcttgccacctatcacatctttttccaaaactgcaagatacccctatcctgccgtgccaaccgcagccgagcggacaagcagctggccttgcggcagggcgctgtcatacctgatatcgcctcgctcaacgaagtgccaaaaatctttgagggtcttggacgcgacgagaagcgcgcggcaaacgctctgcaacaggaaaacagcgaaaatgaaagtcactctggagtgttggtggaactcgagggtgacaacgcgcgcctagccgtactaaaacgcagcatcgaggtcacccactttgcctacccggcacttaacctaccccccaaggtcatgagcacagtcatgagtgagctgatcgtgcgccgtgcgcagcccctggagagggatgcaaatttgcaagaacaaacagaggagggcctacccgcagttggcgacgagcagctagcgcgctggcttcaaacgcgcgagcctgccgacttggaggagcgacgcaaactaatgatggccgcagtgctcgttaccgtggagcttgagtgcatgcagcggttctttgctgacccggagatgcagcgcaagctagaggaaacattgcactacacctttcgacagggctacgtacgccaggcctgcaagatctccaacgtggagctctgcaacctggtctcctaccttggaattttgcacgaaaaccgccttgggcaaaacgtgcttcattccacgctcaagggcgaggcgcgccgcgactacgtccgcgactgcgtttacttatttctatgctacacctggcagacggccatgggcgtttggcagcagtgcttggaggagtgcaacctcaaggagctgcagaaactgctaaagcaaaacttgaaggacctatggacggccttcaacgagcgctccgtggccgcgcacctggcggacatcattttccccgaacgcctgcttaaaaccctgcaacagggtctgccagacttcaccagtcaaagcatgttgcagaactttaggaactttatcctagagcgctcaggaatcttgcccgccacctgctgtgcacttcctagcgactttgtgcccattaagtaccgcgaatgccctccgccgctttggggccactgctaccttctgcagctagccaactaccttgcctaccactctgacataatggaagacgtgagcggtgacggtctactggagtgtcactgtcgctgcaacctatgcaccccgcaccgctccctggtttgcaattcgcagctgcttaacgaaagtcaaattatcggtacctttgagctgcagggtccctcgcctgacgaaaagtccgcggctccggggttgaaactcactccggggctgtggacgtcggcttaccttcgcaaatttgtacctgaggactaccacgcccacgagattaggttctacgaagaccaatcccgcccgcctaatgcggagcttaccgcctgcgtcattacccagggccacattcttggccaattgcaagccatcaacaaagcccgccaagagtttctgctacgaaagggacggggggtttacttggacccccagtccggcgaggagctcaacccaatccccccgccgccgcagccctatcagcagcagccgcgggcccttgcttcccaggatggcacccaaaaagaagctgcagctgccgccgccacccacggacgaggaggaatactgggacagtcaggcagaggaggttttggacgaggaggaggaggacatgatggaagactgggagagcctagacgaggaagcttccgaggtcgaagaggtgtcagacgaaacaccgtcaccctcggtcgcattcccctcgccggcgccccagaaatcggcaaccggttccagcatggctacaacctccgctcctcaggcgccgccggcactgcccgttcgccgacccaaccgtagatgggacaccactggaaccagggccggtaagtccaagcagccgccgccgttagcccaagagcaacaacagcgccaaggctaccgctcatggcgcgggcacaagaacgccatagttgcttgcttgcaagactgtgggggcaacatctccttcgcccgccgctttcttctctaccatcacggcgtggccttcccccgtaacatcctgcattactaccgtcatctctacagcccatactgcaccggcggcagcggcagcaacagcagcggccacacagaagcaaaggcgaccggatagcaagactctgacaaagcccaagaaatccacagcggcggcagcagcaggaggaggagcgctgcgtctggcgcccaacgaacccgtatcgacccgcgagcttagaaacaggatttttcccactctgtatgctatatttcaacagagcaggggccaagaacaagagctgaaaataaaaaacaggtctctgcgatccctcacccgcagctgcctgtatcacaaaagcgaagatcagcttcggcgcacgctggaagacgcggaggctctcttcagtaaatactgcgcgctgactcttaaggactagtttcgcgccctttctcaaatttaagcgcgaaaactacgtcatctccagcggccacacccggcgccagcacctgttgtcagcgccattttttagggcggagtaacttgtatgtgttgggaattgtagttttcttaaaatgggaagtgacgtaacgtgggaaaacggaagtgacgatttgaggaagttgtgggttttttggctttcgtttctgggcgtaggttcgcgtgcggttttctgggtgttttttgtggactttaaccgttacgtcattttttagtcctatatatactcgctctgcacttggcccttttttacactgtgactgattgagctggtgccgtgtcgagtggtgtttttttaataggttttcttttttactggtaaggctgactgttatgactacgtccggcgttccatttggcatgacactacgaccaacacgatctcggttgtctcggcgcactccgtacagtagggatcgtctacctccttttgagacagaaacccgcgctaccatactggaggatcatccgctgctgcccgaatgtaacactttgacaatgcacaacgtgagttacgtgcgaggtcttccctgcagtgtgggatttacgctgattcaggaatgggttgttccctgggatatggttctaacgcgggaggagcttgtaatcctgaggaagtgtatgcacgtgtgcctgtgttgtgccaacattgatatcatgacgagcatgatgatccatggttacgagtcctgggctctccactgtcattgttccagtcccggttccctgcagtgtatagccggcgggcaggttttggccagctggtttaggatggtggtggatggcgccatgtttaatcagaggtttatatggtaccgggaggtggtgaattacaacatgccaaaagaggtaatgtttatgtccagcgtgtttatgaggggtcgccacttaatctacctgcgcttgtggtatgatggccacgtgggttctgtggtccccgccatgagctttggatacagcgccttgcactgtgggattttgaacaatattgtggtgctgtgctgcagttactgtgctgatttaagtgagatcagggtgcgctgctgtgcccggaggacaaggcgccttatgctgcgggcggtgcgaatcatcgctgaggagaccactgccatgttgtattcctgcaggacggagcggcggcggcagcagtttattcgcgcgctgctgcagcaccaccgccctatcctgatgcacgattatgactctacccccatgtaggcgtggacttctccttcgccgcccgttaagcaaccgcaagttggacagcagcctgtggctcagcagctggacagcgacatgaacttaagtgagctgcccggggagtttattaatatcactgatgagcgtttggctcgacaggaaaccgtgtggaatataacacctaagaatatgtctgttacccatgatatgatgctttttaaggccagccggggagaaaggactgtgtactctgtgtgttgggagggaggtggcaggttgaatactagggttctgtgagtttgattaaggtacggtgatctgtataagctatgtggtggtggggctatactactgaatgaaaaatgacttgaaattttctgcaattgaaaaataaacacgttgaaacataacacaaacgattctttattcttgggcaatgtatgaaaaagtgtaagaggatgtggcaaatatttcattaatgtagttgtggccagaccagtcccatgaaaatgacatagagtatgcacttggagttgtgtctcctgtttcctgtgtaccgtttagtgtaatggttagtgttacaggtttagttttgtctccgtttaagtaaacttgactgacaatgttacttttggcagttttaccgtgagattttggataagctgataggttaggcataaatccaacagcgtttgtataggctgtcgcccctcctgacgcggtaggaggaggggagggtgccctgcatgtctgccgctgctcttgctcttgccgctgctgaggaggggggcgcatctgccgcagcaccggatgcatctgggaaaagcaaaaaaggggctcgtccctgtttccggaggaatttgcaagcggggtcttgcatgacggggaggcaaacccccgttcgccgcagtccggccggtccgagactcgaaccgggggtcccgcgactcaacccttggaaaataaccctccggctacagggagcgagccacttaatgctttcgctttccagcctaaccgcttacgctgcgcgcggccagtggccaaaaaagctagcgcagcagccgccgcgcctggaaggaagccaaaaggagcactcccccgttgtctgacgtcgcacacctgggttcgacacgcgggcggtaaccgcatggatcacggcggacggccggatacggggctcgaaccccggtcgtccgccatgatacccttgcgaatttatccaccagaccacggaagagtgcccgcttacaggctctccttttgcacggtctagagcgtcaacgattgcgcgcgcctgaccggccagagcgtcccgaccatggagcactttttgccgctgcgcaacatctggaaccgcgtccgcgactttccgcgcgcctccaccaccgccgccggcatcacctggatgtccaggtacatctacggata

SEQ ID NO: 32 - DNA, 7402 bp, synthetic construct
  source 1..7402: mol_type = other DNA
aataaaggcaaatgcttttatttgtacactctcgggtgattatttacccccacccttgccgtctgcgccgtttaaaaatcaaaggggttctgccgcgcatcgctatgcgccactggcagggacacgttgcgatactggtgtttagtgctccacttaaactcaggcacaaccatccgcggcagctcggtgaagttttcactccacaggctgcgcaccatcaccaacgcgtttagcaggtcgggcgccgatatcttgaagtcgcagttggggcctccgccctgcgcgcgcgagttgcgatacacagggttgcagcactggaacactatcagcgccgggtggtgcacgctggccagcacgctcttgtcggagatcagatccgcgtccaggtcctccgcgttgctcagggcgaacggagtcaactttggtagctgccttcccaaaaagggcgcgtgcccaggctttgagttgcactcgcaccgtagtggcatcaaaaggtgaccgtgcccggtctgggcgttaggatacagcgcctgcataaaagccttgatctgcttaaaagccacctgagcctttgcgccttcagagaagaacatgccgcaagacttgccggaaaactgattggccggacaggccgcgtcgtgcacgcagcaccttgcgtcggtgttggagatctgcaccacatttcggccccaccggttcttcacgatcttggccttgctagactgctccttcagcgcgcgctgcccgttttcgctcgtcacatccatttcaatcacgtgctccttatttatcataatgcttccgtgtagacacttaagctcgccttcgatctcagcgcagcggtgcagccacaacgcgcagcccgtgggctcgtgatgcttgtaggtcacctctgcaaacgactgcaggtacgcctgcaggaatcgccccatcatcgtcacaaaggtcttgttgctggtgaaggtcagctgcaacccgcggtgctcctcgttcagccaggtcttgcatacggccgccagagcttccacttggtcaggcagtagtttgaagttcgcctttagatcgttatccacgtggtacttgtccatcagcgcgcgcgcagcctccatgcccttctcccacgcagacacgatcggcacactcagcgggttcatcaccgtaatttcactttccgcttcgctgggctcttcctcttcctcttgcgtccgcataccacgcgccactgggtcgtcttcattcagccgccgcactgtgcgcttacctcctttgccatgcttgattagcaccggtgggttgctgaaacccaccatttgtagcgccacatcttctctttcttcctcgctgtccacgattacctctggtgatggcgggcgctcgggcttgggagaagggcgcttctttttcttcttgggcgcaatggccaaatccgccgccgaggtcgatggccgcgggctgggtgtgcgcggcaccagcgcgtcttgtgatgagtcttcctcgtcctcggactcgatacgccgcctcatccgcttttttgggggcgcccggggaggcggcggcgacggggacggggacgacacgtcctccatggttgggggacgtcgcgccgcaccgcgtccgcgctcgggggtggtttcgcgctgctcctcttcccgactggccatttccttctcctataggcagaaaaagatctgatgatcagtcgagaagaaggacagcctaaccgccccctctgagttcgccaccaccgcctccaccgatgccgccaacgcgcctaccaccttccccgtcgaggcacccccgcttgaggaggaggaagtgattatcgagcaggacccaggttttgtaagcgaagacgacgaggaccgctcagtaccaacagaggataaaaagcaagaccaggacaacgcagaggcaaacgaggaacaagtcgggcggggggacgaaaggcatggcgactacctagatgtgggagacgacgtgctgttgaagcatctgcagcgccagtgcgccattatctgcgacgcgttgcaagagcgcagcgatgtgcccctcgccatagcggatgtcagccttgcctacgaacgccacctattctcaccgcgcgtaccccccaaacgccaagaaaacggcacatgcgagcccaacccgcgcctcaacttctaccccgtatttgccgtgccagaggtgcttgccacctatcacatctttttccaaaactgcaagatacccctatcctgccgtgccaaccgcagccgagcggacaagcagctggccttgcggcagggcgctgtcatacctgatatcgcctcgctcaacgaagtgccaaaaatctttgagggtcttggacgcgacgagaagcgcgcggcaaacgctctgcaacaggaaaacagcgaaaatgaaagtcactctggagtgttggtggaactcgagggtgacaacgcgcgcctagccgtactaaaacgcagcatcgaggtcacccactttgcctacccggcacttaacctaccccccaaggtcatgagcacagtcatgagtgagctgatcgtgcgccgtgcgcagcccctggagagggatgcaaatttgcaagaacaaacagaggagggcctacccgcagttggcgacgagcagctagcgcgctggcttcaaacgcgcgagcctgccgacttggaggagcgacgcaaactaatgatggccgcagtgctcgttaccgtggagcttgagtgcatgcagcggttctttgctgacccggagatgcagcgcaagctagaggaaacattgcactacacctttcgacagggctacgtacgccaggcctgcaagatctccaacgtggagctctgcaacctggtctcctaccttggaattttgcacgaaaaccgccttgggcaaaacgtgcttcattccacgctcaagggcgaggcgcgccgcgactacgtccgcgactgcgtttacttatttctatgctacacctggcagacggccatgggcgtttggcagcagtgcttggaggagtgcaacctcaaggagctgcagaaactgctaaagcaaaacttgaaggacctatggacggccttcaacgagcgctccgtggccgcgcacctggcggacatcattttccccgaacgcctgcttaaaaccctgcaacagggtctgccagacttcaccagtcaaagcatgttgcagaactttaggaactttatcctagagcgctcaggaatcttgcccgccacctgctgtgcacttcctagcgactttgtgcccattaagtaccgcgaatgccctccgccgctttggggccactgctaccttctgcagctagccaactaccttgcctaccactctgacataatggaagacgtgagcggtgacggtctactggagtgtcactgtcgctgcaacctatgcaccccgcaccgctccctggtttgcaattcgcagctgcttaacgaaagtcaaattatcggtacctttgagctgcagggtccctcgcctgacgaaaagtccgcggctccggggttgaaactcactccggggctgtggacgtcggcttaccttcgcaaatttgtacctgaggactaccacgcccacgagattaggttctacgaagaccaatcccgcccgcctaatgcggagcttaccgcctgcgtcattacccagggccacattcttggccaattgcaagccatcaacaaagcccgccaagagtttctgctacgaaagggacggggggtttacttggacccccagtccggcgaggagctcaacccaatccccccgccgccgcagccctatcagcagcagccgcgggcccttgcttcccaggatggcacccaaaaagaagctgcagctgccgccgccacccacggacgaggaggaatactgggacagtcaggcagaggaggttttggacgaggaggaggaggacatgatggaagactgggagagcctagacgaggaagcttccgaggtcgaagaggtgtcagacgaaacaccgtcaccctcggtcgcattcccctcgccggcgccccagaaatcggcaaccggttccagcatggctacaacctccgctcctcaggcgccgccggcactgcccgttcgccgacccaaccgtagatgggacaccactggaaccagggccggtaagtccaagcagccgccgccgttagcccaagagcaacaacagcgccaaggctaccgctcatggcgcgggcacaagaacgccatagttgcttgcttgcaagactgtgggggcaacatctccttcgcccgccgctttcttctctaccatcacggcgtggccttcccccgtaacatcctgcattactaccgtcatctctacagcccatactgcaccggcggcagcggcagcaacagcagcggccacacagaagcaaaggcgaccggatagcaagactctgacaaagcccaagaaatccacagcggcggcagcagcaggaggaggagcgctgcgtctggcgcccaacgaacccgtatcgacccgcgagcttagaaacaggatttttcccactctgtatgctatatttcaacagagcaggggccaagaacaagagctgaaaataaaaaacaggtctctgcgatccctcacccgcagctgcctgtatcacaaaagcgaagatcagcttcggcgcacgctggaagacgcggaggctctcttcagtaaatactgcgcgctgactcttaaggactagtttcgcgccctttctcaaatttaagcgcgaaaactacgtcatctccagcggccacacccggcgccagcacctgttgtcagcgccattttttagggcggagtaacttgtatgtgttgggaattgtagttttcttaaaatgggaagtgacgtaacgtgggaaaacggaagtgacgatttgaggaagttgtgggttttttggctttcgtttctgggcgtaggttcgcgtgcggttttctgggtgttttttgtggactttaaccgttacgtcattttttagtcctatatatactcgctctgcacttggcccttttttacactgtgactgattgagctggtgccgtgtcgagtggtgtttttttaataggttttcttttttactggtaaggctgactgttatgactacgtccggcgttccatttggcatgacactacgaccaacacgatctcggttgtctcggcgcactccgtacagtagggatcgtctacctccttttgagacagaaacccgcgctaccatactggaggatcatccgctgctgcccgaatgtaacactttgacaatgcacaacgtgagttacgtgcgaggtcttccctgcagtgtgggatttacgctgattcaggaatgggttgttccctgggatatggttctaacgcgggaggagcttgtaatcctgaggaagtgtatgcacgtgtgcctgtgttgtgccaacattgatatcatgacgagcatgatgatccatggttacgagtcctgggctctccactgtcattgttccagtcccggttccctgcagtgtatagccggcgggcaggttttggccagctggtttaggatggtggtggatggcgccatgtttaatcagaggtttatatggtaccgggaggtggtgaattacaacatgccaaaagaggtaatgtttatgtccagcgtgtttatgaggggtcgccacttaatctacctgcgcttgtggtatgatggccacgtgggttctgtggtccccgccatgagctttggatacagcgccttgcactgtgggattttgaacaatattgtggtgctgtgctgcagttactgtgctgatttaagtgagatcagggtgcgctgctgtgcccggaggacaaggcgccttatgctgcgggcggtgcgaatcatcgctgaggagaccactgccatgttgtattcctgcaggacggagcggcggcggcagcagtttattcgcgcgctgctgcagcaccaccgccctatcctgatgcacgattatgactctacccccatgtaggcgtggacttctccttcgccgcccgttaagcaaccgcaagttggacagcagcctgtggctcagcagctggacagcgacatgaacttaagtgagctgcccggggagtttattaatatcactgatgagcgtttggctcgacaggaaaccgtgtggaatataacacctaagaatatgtctgttacccatgatatgatgctttttaaggccagccggggagaaaggactgtgtactctgtgtgttgggagggaggtggcaggttgaatactagggttctgtgagtttgattaaggtacggtgatctgtataagctatgtggtggtggggctatactactgaatgaaaaatgacttgaaattttctgcaattgaaaaataaacacgttgaaacataacacaaacgattctttattcttgggcaatgtatgaaaaagtgtaagaggatgtggcaaatatttcattaatgtagttgtggccagaccagtcccatgaaaatgacatagagtatgcacttggagttgtgtctcctgtttcctgtgtaccgtttagtgtaatggttagtgttacaggtttagttttgtctccgtttaagtaaacttgactgacaatgttacttttggcagttttaccgtgagattttggataagctgataggttaggcataaatccaacagcgtttgtataggctgtcgcccctcctgacgcggtaggaggaggggagggtgccctgcatgtctgccgctgctcttgctcttgccgctgctgaggaggggggcgcatctgccgcagcaccggatgcatctgggaaaagcaaaaaaggggctcgtccctgtttccggaggaatttgcaagcggggtcttgcatgacggggaggcaaacccccgttcgccgcagtccggccggtccgagactcgaaccgggggtcccgcgactcaacccttggaaaataaccctccggctacagggagcgagccacttaatgctttcgctttccagcctaaccgcttacgctgcgcgcggccagtggccaaaaaagctagcgcagcagccgccgcgcctggaaggaagccaaaaggagcactcccccgttgtctgacgtcgcacacctgggttcgacacgcgggcggtaaccgcatggatcacggcggacggccggatacggggctcgaaccccggtcgtccgccatgatacccttgcgaatttatccaccagaccacggaagagtgcccgcttacaggctctccttttgcacggtctagagcgtcaacgattgcgcgcgcctgaccggccagagcgtcccgaccatggagcactttttgccgctgcgcaacatctggaaccgcgtccgcgactttccgcgcgcctccaccaccgccgccggcatcacctggatgtccaggtacatctacggata

SEQ ID NO: 33 - DNA, 7337 bp, synthetic construct
  source 1..7337: mol_type = other DNA
ttaaaaatcaaaggggttctgccgcgcatcgctatgcgccactggcagggacacgttgcgatactggtgtttagtgctccacttaaactcaggcacaaccatccgcggcagctcggtgaagttttcactccacaggctgcgcaccatcaccaacgcgtttagcaggtcgggcgccgatatcttgaagtcgcagttggggcctccgccctgcgcgcgcgagttgcgatacacagggttgcagcactggaacactatcagcgccgggtggtgcacgctggccagcacgctcttgtcggagatcagatccgcgtccaggtcctccgcgttgctcagggcgaacggagtcaactttggtagctgccttcccaaaaagggcgcgtgcccaggctttgagttgcactcgcaccgtagtggcatcaaaaggtgaccgtgcccggtctgggcgttaggatacagcgcctgcataaaagccttgatctgcttaaaagccacctgagcctttgcgccttcagagaagaacatgccgcaagacttgccggaaaactgattggccggacaggccgcgtcgtgcacgcagcaccttgcgtcggtgttggagatctgcaccacatttcggccccaccggttcttcacgatcttggccttgctagactgctccttcagcgcgcgctgcccgttttcgctcgtcacatccatttcaatcacgtgctccttatttatcataatgcttccgtgtagacacttaagctcgccttcgatctcagcgcagcggtgcagccacaacgcgcagcccgtgggctcgtgatgcttgtaggtcacctctgcaaacgactgcaggtacgcctgcaggaatcgccccatcatcgtcacaaaggtcttgttgctggtgaaggtcagctgcaacccgcggtgctcctcgttcagccaggtcttgcatacggccgccagagcttccacttggtcaggcagtagtttgaagttcgcctttagatcgttatccacgtggtacttgtccatcagcgcgcgcgcagcctccatgcccttctcccacgcagacacgatcggcacactcagcgggttcatcaccgtaatttcactttccgcttcgctgggctcttcctcttcctcttgcgtccgcataccacgcgccactgggtcgtcttcattcagccgccgcactgtgcgcttacctcctttgccatgcttgattagcaccggtgggttgctgaaacccaccatttgtagcgccacatcttctctttcttcctcgctgtccacgattacctctggtgatggcgggcgctcgggcttgggagaagggcgcttctttttcttcttgggcgcaatggccaaatccgccgccgaggtcgatggccgcgggctgggtgtgcgcggcaccagcgcgtcttgtgatgagtcttcctcgtcctcggactcgatacgccgcctcatccgcttttttgggggcgcccggggaggcggcggcgacggggacggggacgacacgtcctccatggttgggggacgtcgcgccgcaccgcgtccgcgctcgggggtggtttcgcgctgctcctcttcccgactggccatttccttctcctataggcagaaaaagatctgatgagagtcagtcgagaagaaggacagcctaaccgccccctctgagttcgccaccaccgcctccaccgatgccgccaacgcgcctaccaccttccccgtcgaggcacccccgcttgaggaggaggaagtgattatcgagcaggacccaggttttgtaagcgaagacgacgaggaccgctcagtaccaacagaggataaaaagcaagaccaggacaacgcagaggcaaacgaggaacaagtcgggcggggggacgaaaggcatggcgactacctagatgtgggagacgacgtgctgttgaagcatctgcagcgccagtgcgccattatctgcgacgcgttgcaagagcgcagcgatgtgcccctcgccatagcggatgtcagccttgcctacgaacgccacctattctcaccgcgcgtaccccccaaacgccaagaaaacggcacatgcgagcccaacccgcgcctcaacttctaccccgtatttgccgtgccagaggtgcttgccacctatcacatctttttccaaaactgcaagatacccctatcctgccgtgccaaccgcagccgagcggacaagcagctggccttgcggcagggcgctgtcatacctgatatcgcctcgctcaacgaagtgccaaaaatctttgagggtcttggacgcgacgagaagcgcgcggcaaacgctctgcaacaggaaaacagcgaaaatgaaagtcactctggagtgttggtggaactcgagggtgacaacgcgcgcctagccgtactaaaacgcagcatcgaggtcacccactttgcctacccggcacttaacctaccccccaaggtcatgagcacagtcatgagtgagctgatcgtgcgccgtgcgcagcccctggagagggatgcaaatttgcaagaacaaacagaggagggcctacccgcagttggcgacgagcagctagcgcgctggcttcaaacgcgcgagcctgccgacttggaggagcgacgcaaactaatgatggccgcagtgctcgttaccgtggagcttgagtgcatgcagcggttctttgctgacccggagatgcagcgcaagctagaggaaacattgcactacacctttcgacagggctacgtacgccaggcctgcaagatctccaacgtggagctctgcaacctggtctcctaccttggaattttgcacgaaaaccgccttgggcaaaacgtgcttcattccacgctcaagggcgaggcgcgccgcgactacgtccgcgactgcgtttacttatttctatgctacacctggcagacggccatgggcgtttggcagcagtgcttggaggagtgcaacctcaaggagctgcagaaactgctaaagcaaaacttgaaggacctatggacggccttcaacgagcgctccgtggccgcgcacctggcggacatcattttccccgaacgcctgcttaaaaccctgcaacagggtctgccagacttcaccagtcaaagcatgttgcagaactttaggaactttatcctagagcgctcaggaatcttgcccgccacctgctgtgcacttcctagcgactttgtgcccattaagtaccgcgaatgccctccgccgctttggggccactgctaccttctgcagctagccaactaccttgcctaccactctgacataatggaagacgtgagcggtgacggtctactggagtgtcactgtcgctgcaacctatgcaccccgcaccgctccctggtttgcaattcgcagctgcttaacgaaagtcaaattatcggtacctttgagctgcagggtccctcgcctgacgaaaagtccgcggctccggggttgaaactcactccggggctgtggacgtcggcttaccttcgcaaatttgtacctgaggactaccacgcccacgagattaggttctacgaagaccaatcccgcccgcctaatgcggagcttaccgcctgcgtcattacccagggccacattcttggccaattgcaagccatcaacaaagcccgccaagagtttctgctacgaaagggacggggggtttacttggacccccagtccggcgaggagctcaacccaatccccccgccgccgcagccctatcagcagcagccgcgggcccttgcttcccaggtgatgagcacccaaaaagaagctgcagctgccgccgccacccacggacgaggaggaatactgggacagtcaggcagaggaggttttggacgaggaggaggaggacatgatggaagactgggagagcctagacgaggaagcttccgaggtcgaagaggtgtcagacgaaacaccgtcaccctcggtcgcattcccctcgccggcgccccagaaatcggcaaccggttccagcatggctacaacctccgctcctcaggcgccgccggcactgcccgttcgccgacccaaccgtagatgggacaccactggaaccagggccggtaagtccaagcagccgccgccgttagcccaagagcaacaacagcgccaaggctaccgctcatggcgcgggcacaagaacgccatagttgcttgcttgcaagactgtgggggcaacatctccttcgcccgccgctttcttctctaccatcacggcgtggccttcccccgtaacatcctgcattactaccgtcatctctacagcccatactgcaccggcggcagcggcagcaacagcagcggccacacagaagcaaaggcgaccggatagcaagactctgacaaagcccaagaaatccacagcggcggcagcagcaggaggaggagcgctgcgtctggcgcccaacgaacccgtatcgacccgcgagcttagaaacaggatttttcccactctgtatgctatatttcaacagagcaggggccaagaacaagagctgaaaataaaaaacaggtctctgcgatccctcacccgcagctgcctgtatcacaaaagcgaagatcagcttcggcgcacgctggaagacgcggaggctctcttcagtaaatactgcgcgctgactcttaaggactagtttcgcgccctttctcaaatttaagcgcgaaaactacgtcatctccagcggccacacccggcgccagcacctgttgtcagcgccattttttagggcggagtaacttgtatgtgttgggaattgtagttttcttaaaatgggaagtgacgtaacgtgggaaaacggaagtgacgatttgaggaagttgtgggttttttggctttcgtttctgggcgtaggttcgcgtgcggttttctgggtgttttttgtggactttaaccgttacgtcattttttagtcctatatatactcgctctgcacttggcccttttttacactgtgactgattgagctggtgccgtgtcgagtggtgtttttttaataggttttcttttttactggtaaggctgactgttatgactacgtccggcgttccatttggcatgacactacgaccaacacgatctcggttgtctcggcgcactccgtacagtagggatcgtctacctccttttgagacagaaacccgcgctaccatactggaggatcatccgctgctgcccgaatgtaacactttgacaatgcacaacgtgagttacgtgcgaggtcttccctgcagtgtgggatttacgctgattcaggaatgggttgttccctgggatatggttctaacgcgggaggagcttgtaatcctgaggaagtgtatgcacgtgtgcctgtgttgtgccaacattgatatcatgacgagcatgatgatccatggttacgagtcctgggctctccactgtcattgttccagtcccggttccctgcagtgtatagccggcgggcaggttttggccagctggtttaggatggtggtggatggcgccatgtttaatcagaggtttatatggtaccgggaggtggtgaattacaacatgccaaaagaggtaatgtttatgtccagcgtgtttatgaggggtcgccacttaatctacctgcgcttgtggtatgatggccacgtgggttctgtggtccccgccatgagctttggatacagcgccttgcactgtgggattttgaacaatattgtggtgctgtgctgcagttactgtgctgatttaagtgagatcagggtgcgctgctgtgcccggaggacaaggcgccttatgctgcgggcggtgcgaatcatcgctgaggagaccactgccatgttgtattcctgcaggacggagcggcggcggcagcagtttattcgcgcgctgctgcagcaccaccgccctatcctgatgcacgattatgactctacccccatgtaggcgtggacttctccttcgccgcccgttaagcaaccgcaagttggacagcagcctgtggctcagcagctggacagcgacatgaacttaagtgagctgcccggggagtttattaatatcactgatgagcgtttggctcgacaggaaaccgtgtggaatataacacctaagaatatgtctgttacccatgatatgatgctttttaaggccagccggggagaaaggactgtgtactctgtgtgttgggagggaggtggcaggttgaatactagggttctgtgagtttgattaaggtacggtgatctgtataagctatgtggtggtggggctatactactgaatgaaaaatgacttgaaattttctgcaattgaaaaataaacacgttgaaacataacacaaacgattctttattcttgggcaatgtatgaaaaagtgtaagaggatgtggcaaatatttcattaatgtagttgtggccagaccagtcccatgaaaatgacatagagtatgcacttggagttgtgtctcctgtttcctgtgtaccgtttagtgtaatggttagtgttacaggtttagttttgtctccgtttaagtaaacttgactgacaatgttacttttggcagttttaccgtgagattttggataagctgataggttaggcataaatccaacagcgtttgtataggctgtcgcccctcctgacgcggtaggaggaggggagggtgccctgcatgtctgccgctgctcttgctcttgccgctgctgaggaggggggcgcatctgccgcagcaccggatgcatctgggaaaagcaaaaaaggggctcgtccctgtttccggaggaatttgcaagcggggtcttgcatgacggggaggcaaacccccgttcgccgcagtccggccggtccgagactcgaaccgggggtcccgcgactcaacccttggaaaataaccctccggctacagggagcgagccacttaatgctttcgctttccagcctaaccgcttacgctgcgcgcggccagtggccaaaaaagctagcgcagcagccgccgcgcctggaaggaagccaaaaggagcactcccccgttgtctgacgtcgcacacctgggttcgacacgcgggcggtaaccgcatggatcacggcggacggccggatacggggctcgaaccccggtcgtccgccatgatacccttgcgaatttatccaccagaccacggaagagtgcccgcttacaggctctccttttgcacggtctagagcgtcaacgattgcgcgcgcctgaccggccagagcgtcccgaccatggagcactttttgccgctgcgcaacatctggaaccgcgtccgcgactttccgcgcgcctccaccaccgccgccggcatcacctggatgtccaggtacatctacggata

SEQ ID NO: 34 - DNA, 7408 bp, synthetic construct
  source 1..7408: mol_type = other DNA
aataaaggcaaatgcttttatttgtacactctcgggtgattatttacccccacccttgccgtctgcgccgtttaaaaatcaaaggggttctgccgcgcatcgctatgcgccactggcagggacacgttgcgatactggtgtttagtgctccacttaaactcaggcacaaccatccgcggcagctcggtgaagttttcactccacaggctgcgcaccatcaccaacgcgtttagcaggtcgggcgccgatatcttgaagtcgcagttggggcctccgccctgcgcgcgcgagttgcgatacacagggttgcagcactggaacactatcagcgccgggtggtgcacgctggccagcacgctcttgtcggagatcagatccgcgtccaggtcctccgcgttgctcagggcgaacggagtcaactttggtagctgccttcccaaaaagggcgcgtgcccaggctttgagttgcactcgcaccgtagtggcatcaaaaggtgaccgtgcccggtctgggcgttaggatacagcgcctgcataaaagccttgatctgcttaaaagccacctgagcctttgcgccttcagagaagaacatgccgcaagacttgccggaaaactgattggccggacaggccgcgtcgtgcacgcagcaccttgcgtcggtgttggagatctgcaccacatttcggccccaccggttcttcacgatcttggccttgctagactgctccttcagcgcgcgctgcccgttttcgctcgtcacatccatttcaatcacgtgctccttatttatcataatgcttccgtgtagacacttaagctcgccttcgatctcagcgcagcggtgcagccacaacgcgcagcccgtgggctcgtgatgcttgtaggtcacctctgcaaacgactgcaggtacgcctgcaggaatcgccccatcatcgtcacaaaggtcttgttgctggtgaaggtcagctgcaacccgcggtgctcctcgttcagccaggtcttgcatacggccgccagagcttccacttggtcaggcagtagtttgaagttcgcctttagatcgttatccacgtggtacttgtccatcagcgcgcgcgcagcctccatgcccttctcccacgcagacacgatcggcacactcagcgggttcatcaccgtaatttcactttccgcttcgctgggctcttcctcttcctcttgcgtccgcataccacgcgccactgggtcgtcttcattcagccgccgcactgtgcgcttacctcctttgccatgcttgattagcaccggtgggttgctgaaacccaccatttgtagcgccacatcttctctttcttcctcgctgtccacgattacctctggtgatggcgggcgctcgggcttgggagaagggcgcttctttttcttcttgggcgcaatggccaaatccgccgccgaggtcgatggccgcgggctgggtgtgcgcggcaccagcgcgtcttgtgatgagtcttcctcgtcctcggactcgatacgccgcctcatccgcttttttgggggcgcccggggaggcggcggcgacggggacggggacgacacgtcctccatggttgggggacgtcgcgccgcaccgcgtccgcgctcgggggtggtttcgcgctgctcctcttcccgactggccatttccttctcctataggcagaaaaagatctgatgagagtcagtcgagaagaaggacagcctaaccgccccctctgagttcgccaccaccgcctccaccgatgccgccaacgcgcctaccaccttccccgtcgaggcacccccgcttgaggaggaggaagtgattatcgagcaggacccaggttttgtaagcgaagacgacgaggaccgctcagtaccaacagaggataaaaagcaagaccaggacaacgcagaggcaaacgaggaacaagtcgggcggggggacgaaaggcatggcgactacctagatgtgggagacgacgtgctgttgaagcatctgcagcgccagtgcgccattatctgcgacgcgttgcaagagcgcagcgatgtgcccctcgccatagcggatgtcagccttgcctacgaacgccacctattctcaccgcgcgtaccccccaaacgccaagaaaacggcacatgcgagcccaacccgcgcctcaacttctaccccgtatttgccgtgccagaggtgcttgccacctatcacatctttttccaaaactgcaagatacccctatcctgccgtgccaaccgcagccgagcggacaagcagctggccttgcggcagggcgctgtcatacctgatatcgcctcgctcaacgaagtgccaaaaatctttgagggtcttggacgcgacgagaagcgcgcggcaaacgctctgcaacaggaaaacagcgaaaatgaaagtcactctggagtgttggtggaactcgagggtgacaacgcgcgcctagccgtactaaaacgcagcatcgaggtcacccactttgcctacccggcacttaacctaccccccaaggtcatgagcacagtcatgagtgagctgatcgtgcgccgtgcgcagcccctggagagggatgcaaatttgcaagaacaaacagaggagggcctacccgcagttggcgacgagcagctagcgcgctggcttcaaacgcgcgagcctgccgacttggaggagcgacgcaaactaatgatggccgcagtgctcgttaccgtggagcttgagtgcatgcagcggttctttgctgacccggagatgcagcgcaagctagaggaaacattgcactacacctttcgacagggctacgtacgccaggcctgcaagatctccaacgtggagctctgcaacctggtctcctaccttggaattttgcacgaaaaccgccttgggcaaaacgtgcttcattccacgctcaagggcgaggcgcgccgcgactacgtccgcgactgcgtttacttatttctatgctacacctggcagacggccatgggcgtttggcagcagtgcttggaggagtgcaacctcaaggagctgcagaaactgctaaagcaaaacttgaaggacctatggacggccttcaacgagcgctccgtggccgcgcacctggcggacatcattttccccgaacgcctgcttaaaaccctgcaacagggtctgccagacttcaccagtcaaagcatgttgcagaactttaggaactttatcctagagcgctcaggaatcttgcccgccacctgctgtgcacttcctagcgactttgtgcccattaagtaccgcgaatgccctccgccgctttggggccactgctaccttctgcagctagccaactaccttgcctaccactctgacataatggaagacgtgagcggtgacggtctactggagtgtcactgtcgctgcaacctatgcaccccgcaccgctccctggtttgcaattcgcagctgcttaacgaaagtcaaattatcggtacctttgagctgcagggtccctcgcctgacgaaaagtccgcggctccggggttgaaactcactccggggctgtggacgtcggcttaccttcgcaaatttgtacctgaggactaccacgcccacgagattaggttctacgaagaccaatcccgcccgcctaatgcggagcttaccgcctgcgtcattacccagggccacattcttggccaattgcaagccatcaacaaagcccgccaagagtttctgctacgaaagggacggggggtttacttggacccccagtccggcgaggagctcaacccaatccccccgccgccgcagccctatcagcagcagccgcgggcccttgcttcccaggtgatgagcacccaaaaagaagctgcagctgccgccgccacccacggacgaggaggaatactgggacagtcaggcagaggaggttttggacgaggaggaggaggacatgatggaagactgggagagcctagacgaggaagcttccgaggtcgaagaggtgtcagacgaaacaccgtcaccctcggtcgcattcccctcgccggcgccccagaaatcggcaaccggttccagcatggctacaacctccgctcctcaggcgccgccggcactgcccgttcgccgacccaaccgtagatgggacaccactggaaccagggccggtaagtccaagcagccgccgccgttagcccaagagcaacaacagcgccaaggctaccgctcatggcgcgggcacaagaacgccatagttgcttgcttgcaagactgtgggggcaacatctccttcgcccgccgctttcttctctaccatcacggcgtggccttcccccgtaacatcctgcattactaccgtcatctctacagcccatactgcaccggcggcagcggcagcaacagcagcggccacacagaagcaaaggcgaccggatagcaagactctgacaaagcccaagaaatccacagcggcggcagcagcaggaggaggagcgctgcgtctggcgcccaacgaacccgtatcgacccgcgagcttagaaacaggatttttcccactctgtatgctatatttcaacagagcaggggccaagaacaagagctgaaaataaaaaacaggtctctgcgatccctcacccgcagctgcctgtatcacaaaagcgaagatcagcttcggcgcacgctggaagacgcggaggctctcttcagtaaatactgcgcgctgactcttaaggactagtttcgcgccctttctcaaatttaagcgcgaaaactacgtcatctccagcggccacacccggcgccagcacctgttgtcagcgccattttttagggcggagtaacttgtatgtgttgggaattgtagttttcttaaaatgggaagtgacgtaacgtgggaaaacggaagtgacgatttgaggaagttgtgggttttttggctttcgtttctgggcgtaggttcgcgtgcggttttctgggtgttttttgtggactttaaccgttacgtcattttttagtcctatatatactcgctctgcacttggcccttttttacactgtgactgattgagctggtgccgtgtcgagtggtgtttttttaataggttttcttttttactggtaaggctgactgttatgactacgtccggcgttccatttggcatgacactacgaccaacacgatctcggttgtctcggcgcactccgtacagtagggatcgtctacctccttttgagacagaaacccgcgctaccatactggaggatcatccgctgctgcccgaatgtaacactttgacaatgcacaacgtgagttacgtgcgaggtcttccctgcagtgtgggatttacgctgattcaggaatgggttgttccctgggatatggttctaacgcgggaggagcttgtaatcctgaggaagtgtatgcacgtgtgcctgtgttgtgccaacattgatatcatgacgagcatgatgatccatggttacgagtcctgggctctccactgtcattgttccagtcccggttccctgcagtgtatagccggcgggcaggttttggccagctggtttaggatggtggtggatggcgccatgtttaatcagaggtttatatggtaccgggaggtggtgaattacaacatgccaaaagaggtaatgtttatgtccagcgtgtttatgaggggtcgccacttaatctacctgcgcttgtggtatgatggccacgtgggttctgtggtccccgccatgagctttggatacagcgccttgcactgtgggattttgaacaatattgtggtgctgtgctgcagttactgtgctgatttaagtgagatcagggtgcgctgctgtgcccggaggacaaggcgccttatgctgcgggcggtgcgaatcatcgctgaggagaccactgccatgttgtattcctgcaggacggagcggcggcggcagcagtttattcgcgcgctgctgcagcaccaccgccctatcctgatgcacgattatgactctacccccatgtaggcgtggacttctccttcgccgcccgttaagcaaccgcaagttggacagcagcctgtggctcagcagctggacagcgacatgaacttaagtgagctgcccggggagtttattaatatcactgatgagcgtttggctcgacaggaaaccgtgtggaatataacacctaagaatatgtctgttacccatgatatgatgctttttaaggccagccggggagaaaggactgtgtactctgtgtgttgggagggaggtggcaggttgaatactagggttctgtgagtttgattaaggtacggtgatctgtataagctatgtggtggtggggctatactactgaatgaaaaatgacttgaaattttctgcaattgaaaaataaacacgttgaaacataacacaaacgattctttattcttgggcaatgtatgaaaaagtgtaagaggatgtggcaaatatttcattaatgtagttgtggccagaccagtcccatgaaaatgacatagagtatgcacttggagttgtgtctcctgtttcctgtgtaccgtttagtgtaatggttagtgttacaggtttagttttgtctccgtttaagtaaacttgactgacaatgttacttttggcagttttaccgtgagattttggataagctgataggttaggcataaatccaacagcgtttgtataggctgtcgcccctcctgacgcggtaggaggaggggagggtgccctgcatgtctgccgctgctcttgctcttgccgctgctgaggaggggggcgcatctgccgcagcaccggatgcatctgggaaaagcaaaaaaggggctcgtccctgtttccggaggaatttgcaagcggggtcttgcatgacggggaggcaaacccccgttcgccgcagtccggccggtccgagactcgaaccgggggtcccgcgactcaacccttggaaaataaccctccggctacagggagcgagccacttaatgctttcgctttccagcctaaccgcttacgctgcgcgcggccagtggccaaaaaagctagcgcagcagccgccgcgcctggaaggaagccaaaaggagcactcccccgttgtctgacgtcgcacacctgggttcgacacgcgggcggtaaccgcatggatcacggcggacggccggatacggggctcgaaccccggtcgtccgccatgatacccttgcgaatttatccaccagaccacggaagagtgcccgcttacaggctctccttttgcacggtctagagcgtcaacgattgcgcgcgcctgaccggccagagcgtcccgaccatggagcactttttgccgctgcgcaacatctggaaccgcgtccgcgactttccgcgcgcctccaccaccgccgccggcatcacctggatgtccaggtacatctacggata

SEQ ID NO: 35 - DNA, 11484 bp, synthetic construct
  source 1..11484: mol_type = other DNA
tcgcgcgtttcggtgatgacggtgaaaacctctgacacatgcagctcccggagacggtcacagcttgtctgtaagcggatgccgggagcagacaagcccgtcagggcgcgtcagcgggtgttggcgggtgtcggggctggcttaactatgcggcatcagagcagattgtactgagagtgcaccatatgcggtgtgaaataccgcacagatgcgtaaggagaaaataccgcatcaggcgccattcgccattcaggctgcgcaactgttgggaagggcgatcggtgcgggcctcttcgctattacgccagctggcgaaagggggatgtgctgcaaggcgattaagttgggtaacgccagggttttcccagtcacgacgttgtaaaacgacggccagtgaattctcgcgatagggataacagggtaataaataatgtactagagacactttcaataaaggcaaatgcttttatttgtacactctcgggtgattatttacccccacccttgccgtctgcgccgtttaaaaatcaaaggggttctgccgcgcatcgctatgcgccactggcagggacacgttgcgatactggtgtttagtgctccacttaaactcaggcacaaccatccgcggcagctcggtgaagttttcactccacaggctgcgcaccatcaccaacgcgtttagcaggtcgggcgccgatatcttgaagtcgcagttggggcctccgccctgcgcgcgcgagttgcgatacacagggttgcagcactggaacactatcagcgccgggtggtgcacgctggccagcacgctcttgtcggagatcagatccgcgtccaggtcctccgcgttgctcagggcgaacggagtcaactttggtagctgccttcccaaaaagggcgcgtgcccaggctttgagttgcactcgcaccgtagtggcatcaaaaggtgaccgtgcccggtctgggcgttaggatacagcgcctgcataaaagccttgatctgcttaaaagccacctgagcctttgcgccttcagagaagaacatgccgcaagacttgccggaaaactgattggccggacaggccgcgtcgtgcacgcagcaccttgcgtcggtgttggagatctgcaccacatttcggccccaccggttcttcacgatcttggccttgctagactgctccttcagcgcgcgctgcccgttttcgctcgtcacatccatttcaatcacgtgctccttatttatcataatgcttccgtgtagacacttaagctcgccttcgatctcagcgcagcggtgcagccacaacgcgcagcccgtgggctcgtgatgcttgtaggtcacctctgcaaacgactgcaggtacgcctgcaggaatcgccccatcatcgtcacaaaggtcttgttgctggtgaaggtcagctgcaacccgcggtgctcctcgttcagccaggtcttgcatacggccgccagagcttccacttggtcaggcagtagtttgaagttcgcctttagatcgttatccacgtggtacttgtccatcagcgcgcgcgcagcctccatgcccttctcccacgcagacacgatcggcacactcagcgggttcatcaccgtaatttcactttccgcttcgctgggctcttcctcttcctcttgcgtccgcataccacgcgccactgggtcgtcttcattcagccgccgcactgtgcgcttacctcctttgccatgcttgattagcaccggtgggttgctgaaacccaccatttgtagcgccacatcttctctttcttcctcgctgtccacgattacctctggtgatggcgggcgctcgggcttgggagaagggcgcttctttttcttcttgggcgcaatggccaaatccgccgccgaggtcgatggccgcgggctgggtgtgcgcggcaccagcgcgtcttgtgatgagtcttcctcgtcctcggactcgatacgccgcctcatccgcttttttgggggcgcccggggaggcggcggcgacggggacggggacgacacgtcctccatggttgggggacgtcgcgccgcaccgcgtccgcgctcgggggtggtttcgcgctgctcctcttcccgactggccatttccttctcctataggcagaaaaagatcatggagtcagtcgagaagaaggacagcctaaccgccccctctgagttcgccaccaccgcctccaccgatgccgccaacgcgcctaccaccttccccgtcgaggcacccccgcttgaggaggaggaagtgattatcgagcaggacccaggttttgtaagcgaagacgacgaggaccgctcagtaccaacagaggataaaaagcaagaccaggacaacgcagaggcaaacgaggaacaagtcgggcggggggacgaaaggcatggcgactacctagatgtgggagacgacgtgctgttgaagcatctgcagcgccagtgcgccattatctgcgacgcgttgcaagagcgcagcgatgtgcccctcgccatagcggatgtcagccttgcctacgaacgccacctattctcaccgcgcgtaccccccaaacgccaagaaaacggcacatgcgagcccaacccgcgcctcaacttctaccccgtatttgccgtgccagaggtgcttgccacctatcacatctttttccaaaactgcaagatacccctatcctgccgtgccaaccgcagccgagcggacaagcagctggccttgcggcagggcgctgtcatacctgatatcgcctcgctcaacgaagtgccaaaaatctttgagggtcttggacgcgacgagaagcgcgcggcaaacgctctgcaacaggaaaacagcgaaaatgaaagtcactctggagtgttggtggaactcgagggtgacaacgcgcgcctagccgtactaaaacgcagcatcgaggtcacccactttgcctacccggcacttaacctaccccccaaggtcatgagcacagtcatgagtgagctgatcgtgcgccgtgcgcagcccctggagagggatgcaaatttgcaagaacaaacagaggagggcctacccgcagttggcgacgagcagctagcgcgctggcttcaaacgcgcgagcctgccgacttggaggagcgacgcaaactaatgatggccgcagtgctcgttaccgtggagcttgagtgcatgcagcggttctttgctgacccggagatgcagcgcaagctagaggaaacattgcactacacctttcgacagggctacgtacgccaggcctgcaagatctccaacgtggagctctgcaacctggtctcctaccttggaattttgcacgaaaaccgccttgggcaaaacgtgcttcattccacgctcaagggcgaggcgcgccgcgactacgtccgcgactgcgtttacttatttctatgctacacctggcagacggccatgggcgtttggcagcagtgcttggaggagtgcaacctcaaggagctgcagaaactgctaaagcaaaacttgaaggacctatggacggccttcaacgagcgctccgtggccgcgcacctggcggacatcattttccccgaacgcctgcttaaaaccctgcaacagggtctgccagacttcaccagtcaaagcatgttgcagaactttaggaactttatcctagagcgctcaggaatcttgcccgccacctgctgtgcacttcctagcgactttgtgcccattaagtaccgcgaatgccctccgccgctttggggccactgctaccttctgcagctagccaactaccttgcctaccactctgacataatggaagacgtgagcggtgacggtctactggagtgtcactgtcgctgcaacctatgcaccccgcaccgctccctggtttgcaattcgcagctgcttaacgaaagtcaaattatcggtacctttgagctgcagggtccctcgcctgacgaaaagtccgcggctccggggttgaaactcactccggggctgtggacgtcggcttaccttcgcaaatttgtacctgaggactaccacgcccacgagattaggttctacgaagaccaatcccgcccgcctaatgcggagcttaccgcctgcgtcattacccagggccacattcttggccaattgcaagccatcaacaaagcccgccaagagtttctgctacgaaagggacggggggtttacttggacccccagtccggcgaggagctcaacccaatccccccgccgccgcagccctatcagcagcagccgcgggcccttgcttcccaggatggcacccaaaaagaagctgcagctgccgccgccacccacggacgaggaggaatactgggacagtcaggcagaggaggttttggacgaggaggaggaggacatgatggaagactgggagagcctagacgaggaagcttccgaggtcgaagaggtgtcagacgaaacaccgtcaccctcggtcgcattcccctcgccggcgccccagaaatcggcaaccggttccagcatggctacaacctccgctcctcaggcgccgccggcactgcccgttcgccgacccaaccgtagatgggacaccactggaaccagggccggtaagtccaagcagccgccgccgttagcccaagagcaacaacagcgccaaggctaccgctcatggcgcgggcacaagaacgccatagttgcttgcttgcaagactgtgggggcaacatctccttcgcccgccgctttcttctctaccatcacggcgtggccttcccccgtaacatcctgcattactaccgtcatctctacagcccatactgcaccggcggcagcggcagcaacagcagcggccacacagaagcaaaggcgaccggatagcaagactctgacaaagcccaagaaatccacagcggcggcagcagcaggaggaggagcgctgcgtctggcgcccaacgaacccgtatcgacccgcgagcttagaaacaggatttttcccactctgtatgctatatttcaacagagcaggggccaagaacaagagctgaaaataaaaaacaggtctctgcgatccctcacccgcagctgcctgtatcacaaaagcgaagatcagcttcggcgcacgctggaagacgcggaggctctcttcagtaaatactgcgcgctgactcttaaggactagtttcgcgccctttctcaaatttaagcgcgaaaactacgtcatctccagcggccacacccggcgccagcacctgttgtcagcgccattttttagggcggagtaacttgtatgtgttgggaattgtagttttcttaaaatgggaagtgacgtaacgtgggaaaacggaagtgacgatttgaggaagttgtgggttttttggctttcgtttctgggcgtaggttcgcgtgcggttttctgggtgttttttgtggactttaaccgttacgtcattttttagtcctatatatactcgctctgcacttggcccttttttacactgtgactgattgagctggtgccgtgtcgagtggtgtttttttaataggttttcttttttactggtaaggctgactgttatggctgccgctgtggaagcgctgtatgttgttctggagcgggagggtgctattttgcctaggcaggagggtttttcaggtgtttatgtgtttttctctcctattaattttgttatacctcctatgggggctgtaatgttgtctctacgcctgcgggtatgtattcccccgggctatttcggtcgctttttagcactgaccgatgtgaatcaacctgatgtgtttaccgagtcttacattatgactccggacatgaccgaggagctgtcggtggtgctttttaatcacggtgaccagtttttttacggtcacgccggcatggccgtagtccgtcttatgcttataagggttgtttttcctgttgtaagacaggcttctaatgtttaaatgtttttttgttattttattttgtgtttatgcagaaacccgcagacatgtttgagagaaaaatggtgtctttttctgtggtggttccggagcttacctgcctttatctgcatgagcatgactacgatgtgctttcttttttgcgcgaggctttgcctgattttttgagcagcaccttgcattttatatcgccgcccatgcaacaagcttacatcggggctacgctggttagcatagctccgagtatgcgtgtcataatcagtgtgggttcttttgtcatggttcctggcggggaagtggccgcgctggtccgtgcagacctgcacgattatgttcagctggccctgcgaagggacctacgggatcgcggtatttttgttaatgttccgcttttgaatcttatacaggtctgtgaggaacctgaatttttgcaatcatgattcgctgcttgaggctgaaggtggagggcgctctggagcagatttttacaatggccggacttaatattcgggatttgcttagagatatattgagaaggtggcgagatgagaattatttgggcatggttgaaggtgctggaatgtttatagaggagattcaccctgaagggtttagcctttacgtccacttggacgtgagggccgtttgccttttggaagccattgtgcaacatcttacaaatgccattatctgttctttggctgtagagtttgaccacgccaccggaggggagcgcgttcacttaatagatcttcattttgaggttttggataatcttttggaataaaaaaaaaaaacatggttcttccagctcttcccgctcctcccgtgtgtgactcgcagaacgaatgtgtaggttggctgggtgtggcttattctgcggtggtggatgttatcagggcagcggcgcatgaaggagtttacatagaacccgaagccagggggcgcctggatgctttgagagagtggatatactacaactactacacagagcgatctaagcggcgagaccggagacgcagatctgtttgtcacgcccgcacctggttttgcttcaggaaatatgactacgtccggcgttccatttggcatgacactacgaccaacacgatctcggttgtctcggcgcactccgtacagtagggatcgtctacctccttttgagacagaaacccgcgctaccatactggaggatcatccgctgctgcccgaatgtaacactttgacaatgcacaacgtgagttacgtgcgaggtcttccctgcagtgtgggatttacgctgattcaggaatgggttgttccctgggatatggttctaacgcgggaggagcttgtaatcctgaggaagtgtatgcacgtgtgcctgtgttgtgccaacattgatatcatgacgagcatgatgatccatggttacgagtcctgggctctccactgtcattgttccagtcccggttccctgcagtgtatagccggcgggcaggttttggccagctggtttaggatggtggtggatggcgccatgtttaatcagaggtttatatggtaccgggaggtggtgaattacaacatgccaaaagaggtaatgtttatgtccagcgtgtttatgaggggtcgccacttaatctacctgcgcttgtggtatgatggccacgtgggttctgtggtccccgccatgagctttggatacagcgccttgcactgtgggattttgaacaatattgtggtgctgtgctgcagttactgtgctgatttaagtgagatcagggtgcgctgctgtgcccggaggacaaggcgccttatgctgcgggcggtgcgaatcatcgctgaggagaccactgccatgttgtattcctgcaggacggagcggcggcggcagcagtttattcgcgcgctgctgcagcaccaccgccctatcctgatgcacgattatgactctacccccatgtaggcgtggacttctccttcgccgcccgttaagcaaccgcaagttggacagcagcctgtggctcagcagctggacagcgacatgaacttaagtgagctgcccggggagtttattaatatcactgatgagcgtttggctcgacaggaaaccgtgtggaatataacacctaagaatatgtctgttacccatgatatgatgctttttaaggccagccggggagaaaggactgtgtactctgtgtgttgggagggaggtggcaggttgaatactagggttctgtgagtttgattaaggtacggtgatctgtataagctatgtggtggtggggctatactactgaatgaaaaatgacttgaaattttctgcaattgaaaaataaacacgttgaaacataacacaaacgattctttattcttgggcaatgtatgaaaaagtgtaagaggatgtggcaaatatttcattaatgtagttgtggccagaccagtcccatgaaaatgacatagagtatgcacttggagttgtgtctcctgtttcctgtgtaccgtttagtgtaatggttagtgttacaggtttagttttgtctccgtttaagtaaacttgactgacaatgttacttttggcagttttaccgtgagattttggataagctgataggttaggcataaatccaacagcgtttgtataggctgtcgcccctcctgacgcggtaggaggaggggagggtgccctgcatgtctgccgctgctcttgctcttgccgctgctgaggaggggggcgcatctgccgcagcaccggatgcatctgggaaaagcaaaaaaggggctcgtccctgtttccggaggaatttgcaagcggggtcttgcatgacggggaggcaaacccccgttcgccgcagtccggccggtccgagactcgaaccgggggtcccgcgactcaacccttggaaaataaccctccggctacagggagcgagccacttaatgctttcgctttccagcctaaccgcttacgctgcgcgcggccagtggccaaaaaagctagcgcagcagccgccgcgcctggaaggaagccaaaaggagcactcccccgttgtctgacgtcgcacacctgggttcgacacgcgggcggtaaccgcatggatcacggcggacggccggatacggggctcgaaccccggtcgtccgccatgatacccttgcgaatttatccaccagaccacggaagagtgcccgcttacaggctctccttttgcacggtctagagcgtcaacgattgcgcgcgcctgaccggccagagcgtcccgaccatggagcactttttgccgctgcgcaacatctggaaccgcgtccgcgactttccgcgcgcctccaccaccgccgccggcatcacctggatgtccaggtacatctacggatatggcaaacagctattatgggtattatgggtgcggccgcggatcccgggcccgtcgactgcagaggcctgcatgcaagcttggcgtaatcatggtcatagctgtttcctgtgtgaaattgttatccgctcacaattccacacaacatacgagccggaagcataaagtgtaaagcctggggtgcctaatgagtgagctaactcacattaattgcgttgcgctcactgcccgctttccagtcgggaaacctgtcgtgccagctgcattaatgaatcggccaacgcgcggggagaggcggtttgcgtattgggcgctcttccgcttcctcgctcactgactcgctgcgctcggtcgttcggctgcggcgagcggtatcagctcactcaaaggcggtaatacggttatccacagaatcaggggataacgcaggaaagaacatgtgagcaaaaggccagcaaaaggccaggaaccgtaaaaaggccgcgttgctggcgtttttccataggctccgcccccctgacgagcatcacaaaaatcgacgctcaagtcagaggtggcgaaacccgacaggactataaagataccaggcgtttccccctggaagctccctcgtgcgctctcctgttccgaccctgccgcttaccggatacctgtccgcctttctcccttcgggaagcgtggcgctttctcatagctcacgctgtaggtatctcagttcggtgtaggtcgttcgctccaagctgggctgtgtgcacgaaccccccgttcagcccgaccgctgcgccttatccggtaactatcgtcttgagtccaacccggtaagacacgacttatcgccactggcagcagccactggtaacaggattagcagagcgaggtatgtaggcggtgctacagagttcttgaagtggtggcctaactacggctacactagaagaacagtatttggtatctgcgctctgctgaagccagttaccttcggaaaaagagttggtagctcttgatccggcaaacaaaccaccgctggtagcggtggtttttttgtttgcaagcagcagattacgcgcagaaaaaaaggatctcaagaagatcctttgatcttttctacggggtctgacgctcagtggaacgaaaactcacgttaagggattttggtcatgagattatcaaaaaggatcttcacctagatccttttaaattaaaaatgaagttttaaatcaagcccaatctgaataatgttacaaccaattaaccaattctgattagaaaaactcatcgagcatcaaatgaaactgcaatttattcatatcaggattatcaataccatatttttgaaaaagccgtttctgtaatgaaggagaaaactcaccgaggcagttccataggatggcaagatcctggtatcggtctgcgattccgactcgtccaacatcaatacaacctattaatttcccctcgtcaaaaataaggttatcaagtgagaaatcaccatgagtgacgactgaatccggtgagaatggcaaaagtttatgcatttctttccagacttgttcaacaggccagccattacgctcgtcatcaaaatcactcgcatcaaccaaaccgttattcattcgtgattgcgcctgagcgagacgaaatacgcgatcgctgttaaaaggacaattacaaacaggaatcgaatgcaaccggcgcaggaacactgccagcgcatcaacaatattttcacctgaatcaggatattcttctaatacctggaatgctgtttttccggggatcgcagtggtgagtaaccatgcatcatcaggagtacggataaaatgcttgatggtcggaagaggcataaattccgtcagccagtttagtctgaccatctcatctgtaacatcattggcaacgctacctttgccatgtttcagaaacaactctggcgcatcgggcttcccatacaagcgatagattgtcgcacctgattgcccgacattatcgcgagcccatttatacccatataaatcagcatccatgttggaatttaatcgcggcctcgacgtttcccgttgaatatggctcataacaccccttgtattactgtttatgtaagcagacagttttattgttcatgatgatatatttttatcttgtgcaatgtaacatcagagattttgagacacgggccagagctgca

SEQ ID NO: 36 - DNA, 10661 bp, synthetic construct
  source 1..10661: mol_type = other DNA
tcgcgcgtttcggtgatgacggtgaaaacctctgacacatgcagctcccggagacggtcacagcttgtctgtaagcggatgccgggagcagacaagcccgtcagggcgcgtcagcgggtgttggcgggtgtcggggctggcttaactatgcggcatcagagcagattgtactgagagtgcaccatatgcggtgtgaaataccgcacagatgcgtaaggagaaaataccgcatcaggcgccattcgccattcaggctgcgcaactgttgggaagggcgatcggtgcgggcctcttcgctattacgccagctggcgaaagggggatgtgctgcaaggcgattaagttgggtaacgccagggttttcccagtcacgacgttgtaaaacgacggccagagaattctcgcgatagggataacagggtaataaataatgtactagagacactttcaataaaggcaaatgcttttatttgtacactctcgggtgattatttacccccacccttgccgtctgcgccgtttaaaaatcaaaggggttctgccgcgcatcgctatgcgccactggcagggacacgttgcgatactggtgtttagtgctccacttaaactcaggcacaaccatccgcggcagctcggtgaagttttcactccacaggctgcgcaccatcaccaacgcgtttagcaggtcgggcgccgatatcttgaagtcgcagttggggcctccgccctgcgcgcgcgagttgcgatacacagggttgcagcactggaacactatcagcgccgggtggtgcacgctggccagcacgctcttgtcggagatcagatccgcgtccaggtcctccgcgttgctcagggcgaacggagtcaactttggtagctgccttcccaaaaagggcgcgtgcccaggctttgagttgcactcgcaccgtagtggcatcaaaaggtgaccgtgcccggtctgggcgttaggatacagcgcctgcataaaagccttgatctgcttaaaagccacctgagcctttgcgccttcagagaagaacatgccgcaagacttgccggaaaactgattggccggacaggccgcgtcgtgcacgcagcaccttgcgtcggtgttggagatctgcaccacatttcggccccaccggttcttcacgatcttggccttgctagactgctccttcagcgcgcgctgcccgttttcgctcgtcacatccatttcaatcacgtgctccttatttatcataatgcttccgtgtagacacttaagctcgccttcgatctcagcgcagcggtgcagccacaacgcgcagcccgtgggctcgtgatgcttgtaggtcacctctgcaaacgactgcaggtacgcctgcaggaatcgccccatcatcgtcacaaaggtcttgttgctggtgaaggtcagctgcaacccgcggtgctcctcgttcagccaggtcttgcatacggccgccagagcttccacttggtcaggcagtagtttgaagttcgcctttagatcgttatccacgtggtacttgtccatcagcgcgcgcgcagcctccatgcccttctcccacgcagacacgatcggcacactcagcgggttcatcaccgtaatttcactttccgcttcgctgggctcttcctcttcctcttgcgtccgcataccacgcgccactgggtcgtcttcattcagccgccgcactgtgcgcttacctcctttgccatgcttgattagcaccggtgggttgctgaaacccaccatttgtagcgccacatcttctctttcttcctcgctgtccacgattacctctggtgatggcgggcgctcgggcttgggagaagggcgcttctttttcttcttgggcgcaatggccaaatccgccgccgaggtcgatggccgcgggctgggtgtgcgcggcaccagcgcgtcttgtgatgagtcttcctcgtcctcggactcgatacgccgcctcatccgcttttttgggggcgcccggggaggcggcggcgacggggacggggacgacacgtcctccatggttgggggacgtcgcgccgcaccgcgtccgcgctcgggggtggtttcgcgctgctcctcttcccgactggccatttccttctcctataggcagaaaaagatcatggagtcagtcgagaagaaggacagcctaaccgccccctctgagttcgccaccaccgcctccaccgatgccgccaacgcgcctaccaccttccccgtcgaggcacccccgcttgaggaggaggaagtgattatcgagcaggacccaggttttgtaagcgaagacgacgaggaccgctcagtaccaacagaggataaaaagcaagaccaggacaacgcagaggcaaacgaggaacaagtcgggcggggggacgaaaggcatggcgactacctagatgtgggagacgacgtgctgttgaagcatctgcagcgccagtgcgccattatctgcgacgcgttgcaagagcgcagcgatgtgcccctcgccatagcggatgtcagccttgcctacgaacgccacctattctcaccgcgcgtaccccccaaacgccaagaaaacggcacatgcgagcccaacccgcgcctcaacttctaccccgtatttgccgtgccagaggtgcttgccacctatcacatctttttccaaaactgcaagatacccctatcctgccgtgccaaccgcagccgagcggacaagcagctggccttgcggcagggcgctgtcatacctgatatcgcctcgctcaacgaagtgccaaaaatctttgagggtcttggacgcgacgagaagcgcgcggcaaacgctctgcaacaggaaaacagcgaaaatgaaagtcactctggagtgttggtggaactcgagggtgacaacgcgcgcctagccgtactaaaacgcagcatcgaggtcacccactttgcctacccggcacttaacctaccccccaaggtcatgagcacagtcatgagtgagctgatcgtgcgccgtgcgcagcccctggagagggatgcaaatttgcaagaacaaacagaggagggcctacccgcagttggcgacgagcagctagcgcgctggcttcaaacgcgcgagcctgccgacttggaggagcgacgcaaactaatgatggccgcagtgctcgttaccgtggagcttgagtgcatgcagcggttctttgctgacccggagatgcagcgcaagctagaggaaacattgcactacacctttcgacagggctacgtacgccaggcctgcaagatctccaacgtggagctctgcaacctggtctcctaccttggaattttgcacgaaaaccgccttgggcaaaacgtgcttcattccacgctcaagggcgaggcgcgccgcgactacgtccgcgactgcgtttacttatttctatgctacacctggcagacggccatgggcgtttggcagcagtgcttggaggagtgcaacctcaaggagctgcagaaactgctaaagcaaaacttgaaggacctatggacggccttcaacgagcgctccgtggccgcgcacctggcggacatcattttccccgaacgcctgcttaaaaccctgcaacagggtctgccagacttcaccagtcaaagcatgttgcagaactttaggaactttatcctagagcgctcaggaatcttgcccgccacctgctgtgcacttcctagcgactttgtgcccattaagtaccgcgaatgccctccgccgctttggggccactgctaccttctgcagctagccaactaccttgcctaccactctgacataatggaagacgtgagcggtgacggtctactggagtgtcactgtcgctgcaacctatgcaccccgcaccgctccctggtttgcaattcgcagctgcttaacgaaagtcaaattatcggtacctttgagctgcagggtccctcgcctgacgaaaagtccgcggctccggggttgaaactcactccggggctgtggacgtcggcttaccttcgcaaatttgtacctgaggactaccacgcccacgagattaggttctacgaagaccaatcccgcccgcctaatgcggagcttaccgcctgcgtcattacccagggccacattcttggccaattgcaagccatcaacaaagcccgccaagagtttctgctacgaaagggacggggggtttacttggacccccagtccggcgaggagctcaacccaatccccccgccgccgcagccctatcagcagcagccgcgggcccttgcttcccaggatggcacccaaaaagaagctgcagctgccgccgccacccacggacgaggaggaatactgggacagtcaggcagaggaggttttggacgaggaggaggaggacatgatggaagactgggagagcctagacgaggaagcttccgaggtcgaagaggtgtcagacgaaacaccgtcaccctcggtcgcattcccctcgccggcgccccagaaatcggcaaccggttccagcatggctacaacctccgctcctcaggcgccgccggcactgcccgttcgccgacccaaccgtagatgggacaccactggaaccagggccggtaagtccaagcagccgccgccgttagcccaagagcaacaacagcgccaaggctaccgctcatggcgcgggcacaagaacgccatagttgcttgcttgcaagactgtgggggcaacatctccttcgcccgccgctttcttctctaccatcacggcgtggccttcccccgtaacatcctgcattactaccgtcatctctacagcccatactgcaccggcggcagcggcagcaacagcagcggccacacagaagcaaaggcgaccggatagcaagactctgacaaagcccaagaaatccacagcggcggcagcagcaggaggaggagcgctgcgtctggcgcccaacgaacccgtatcgacccgcgagcttagaaacaggatttttcccactctgtatgctatatttcaacagagcaggggccaagaacaagagctgaaaataaaaaacaggtctctgcgatccctcacccgcagctgcctgtatcacaaaagcgaagatcagcttcggcgcacgctggaagacgcggaggctctcttcagtaaatactgcgcgctgactcttaaggactagtttcgcgccctttctcaaatttaagcgcgaaaactacgtcatctccagcggccacacccggcgccagcacctgttgtcagcgccattttttagggcggagtaacttgtatgtgttgggaattgtagttttcttaaaatgggaagtgacgtaacgtgggaaaacggaagtgacgatttgaggaagttgtgggttttttggctttcgtttctgggcgtaggttcgcgtgcggttttctgggtgttttttgtggactttaaccgttacgtcattttttagtcctatatatactcgctctgcacttggcccttttttacactgtgactgattgagctggtgccgtgtcgagtggtgtttttttaataggttttcttttttactggtaaggctgactgttatgattcgctgcttgaggctgaaggtggagggcgctctggagcagatttttacaatggccggacttaatattcgggatttgcttagagatatattgagaaggtggcgagatgagaattatttgggcatggttgaaggtgctggaatgtttatagaggagattcaccctgaagggtttagcctttacgtccacttggacgtgagggccgtttgccttttggaagccattgtgcaacatcttacaaatgccattatctgttctttggctgtagagtttgaccacgccaccggaggggagcgcgttcacttaatagatcttcattttgaggttttggataatcttttggaataaaaaaaaaaaacatggttcttccagctcttcccgctcctcccgtgtgtgactcgcagaacgaatgtgtaggttggctgggtgtggcttattctgcggtggtggatgttatcagggcagcggcgcatgaaggagtttacatagaacccgaagccagggggcgcctggatgctttgagagagtggatatactacaactactacacagagcgatctaagcggcgagaccggagacgcagatctgtttgtcacgcccgcacctggttttgcttcaggaaatatgactacgtccggcgttccatttggcatgacactacgaccaacacgatctcggttgtctcggcgcactccgtacagtagggatcgtctacctccttttgagacagaaacccgcgctaccatactggaggatcatccgctgctgcccgaatgtaacactttgacaatgcacaacgtgagttacgtgcgaggtcttccctgcagtgtgggatttacgctgattcaggaatgggttgttccctgggatatggttctaacgcgggaggagcttgtaatcctgaggaagtgtatgcacgtgtgcctgtgttgtgccaacattgatatcatgacgagcatgatgatccatggttacgagtcctgggctctccactgtcattgttccagtcccggttccctgcagtgtatagccggcgggcaggttttggccagctggtttaggatggtggtggatggcgccatgtttaatcagaggtttatatggtaccgggaggtggtgaattacaacatgccaaaagaggtaatgtttatgtccagcgtgtttatgaggggtcgccacttaatctacctgcgcttgtggtatgatggccacgtgggttctgtggtccccgccatgagctttggatacagcgccttgcactgtgggattttgaacaatattgtggtgctgtgctgcagttactgtgctgatttaagtgagatcagggtgcgctgctgtgcccggaggacaaggcgccttatgctgcgggcggtgcgaatcatcgctgaggagaccactgccatgttgtattcctgcaggacggagcggcggcggcagcagtttattcgcgcgctgctgcagcaccaccgccctatcctgatgcacgattatgactctacccccatgtaggcgtggacttctccttcgccgcccgttaagcaaccgcaagttggacagcagcctgtggctcagcagctggacagcgacatgaacttaagtgagctgcccggggagtttattaatatcactgatgagcgtttggctcgacaggaaaccgtgtggaatataacacctaagaatatgtctgttacccatgatatgatgctttttaaggccagccggggagaaaggactgtgtactctgtgtgttgggagggaggtggcaggttgaatactagggttctgtgagtttgattaaggtacggtgatctgtataagctatgtggtggtggggctatactactgaatgaaaaatgacttgaaattttctgcaattgaaaaataaacacgttgaaacataacacaaacgattctttattcttgggcaatgtatgaaaaagtgtaagaggatgtggcaaatatttcattaatgtagttgtggccagaccagtcccatgaaaatgacatagagtatgcacttggagttgtgtctcctgtttcctgtgtaccgtttagtgtaatggttagtgttacaggtttagttttgtctccgtttaagtaaacttgactgacaatgttacttttggcagttttaccgtgagattttggataagctgataggttaggcataaatccaacagcgtttgtataggctgtcgcccctcctgacgcggtaggaggaggggagggtgccctgcatgtctgccgctgctcttgctcttgccgctgctgaggaggggggcgcatctgccgcagcaccggatgcatctgggaaaagcaaaaaaggggctcgtccctgtttccggaggaatttgcaagcggggtcttgcatgacggggaggcaaacccccgttcgccgcagtccggccggtccgagactcgaaccgggggtcccgcgactcaacccttggaaaataaccctccggctacagggagcgagccacttaatgctttcgctttccagcctaaccgcttacgctgcgcgcggccagtggccaaaaaagctagcgcagcagccgccgcgcctggaaggaagccaaaaggagcactcccccgttgtctgacgtcgcacacctgggttcgacacgcgggcggtaaccgcatggatcacggcggacggccggatacggggctcgaaccccggtcgtccgccatgatacccttgcgaatttatccaccagaccacggaagagtgcccgcttacaggctctccttttgcacggtctagagcgtcaacgattgcgcgcgcctgaccggccagagcgtcccgaccatggagcactttttgccgctgcgcaacatctggaaccgcgtccgcgactttccgcgcgcctccaccaccgccgccggcatcacctggatgtccaggtacatctacggatatggcaaacagctattatgggtattatgggtgcggccgcggatcccgggcccgtcgactgcagaggcctgcatgcaagcttggtgtaatcatggtcatagctgtttcctgtgtgaaattgttatccgctcacaattccacacaacatacgagccggaagcataaagtgtaaagcctggggtgcctaatgagtgagctaactcacattaattgcgttgcgctcactgcccgctttccagtcgggaaacctgtcgtgccagctgcattaatgaatcggccaacgcgcggggagaggcggtttgcgtattgggcgctcttccgcttcctcgctcactgactcgctgcgctcggtcgttcggctgcggcgagcggtatcagctcactcaaaggcggtaatacggttatccacagaatcaggggataacgcaggaaagaacatgtgagcaaaaggccagcaaaaggccaggaaccgtaaaaaggccgcgttgctggcgtttttccataggctccgcccccctgacgagcatcacaaaaatcgacgctcaagtcagaggtggcgaaacccgacaggactataaagataccaggcgtttccccctggaagctccctcgtgcgctctcctgttccgaccctgccgcttaccggatacctgtccgcctttctcccttcgggaagcgtggcgctttctcatagctcacgctgtaggtatctcagttcggtgtaggtcgttcgctccaagctgggctgtgtgcacgaaccccccgttcagcccgaccgctgcgccttatccggtaactatcgtcttgagtccaacccggtaagacacgacttatcgccactggcagcagccactggtaacaggattagcagagcgaggtatgtaggcggtgctacagagttcttgaagtggtggcctaactacggctacactagaagaacagtatttggtatctgcgctctgctgaagccagttaccttcggaaaaagagttggtagctcttgatccggcaaacaaaccaccgctggtagcggtggtttttttgtttgcaagcagcagattacgcgcagaaaaaaaggatctcaagaagatcctttgatcttttctacggggtctgacgctcagtggaacgaaaactcacgttaagggattttggtcatgagattatcaaaaaggatcttcacctagatccttttaaattaaaaatgaagttttaaatcaagcccaatctgaataatgttacaaccaattaaccaattctgattagaaaaactcatcgagcatcaaatgaaactgcaatttattcatatcaggattatcaataccatatttttgaaaaagccgtttctgtaatgaaggagaaaactcaccgaggcagttccataggatggcaagatcctggtatcggtctgcgattccgactcgtccaacatcaatacaacctattaatttcccctcgtcaaaaataaggttatcaagtgagaaatcaccatgagtgacgactgaatccggtgagaatggcaaaagtttatgcatttctttccagacttgttcaacaggccagccattacgctcgtcatcaaaatcactcgcatcaaccaaaccgttattcattcgtgattgcgcctgagcgagacgaaatacgcgatcgctgttaaaaggacaattacaaacaggaatcgaatgcaaccggcgcaggaacactgccagcgcatcaacaatattttcacctgaatcaggatattcttctaatacctggaatgctgtttttccggggatcgcagtggtgagtaaccatgcatcatcaggagtacggataaaatgcttgatggtcggaagaggcataaattccgtcagccagtttagtctgaccatctcatctgtaacatcattggcaacgctacctttgccatgtttcagaaacaactctggcgcatcgggcttcccatacaagcgatagattgtcgcacctgattgcccgacattatcgcgagcccatttatacccatataaatcagcatccatgttggaatttaatcgcggcctcgacgtttcccgttgaatatggctcataacaccccttgtattactgtttatgtaagcagacagttttattgttcatgatgatatatttttatcttgtgcaatgtaacatcagagattttgagacacgggccagagctgca

SEQ ID NO: 37 - DNA, 10034 bp, synthetic construct
  source 1..10034: mol_type = other DNA
tcgcgcgtttcggtgatgacggtgaaaacctctgacacatgcagctcccggagacggtcacagcttgtctgtaagcggatgccgggagcagacaagcccgtcagggcgcgtcagcgggtgttggcgggtgtcggggctggcttaactatgcggcatcagagcagattgtactgagagtgcaccatatgcggtgtgaaataccgcacagatgcgtaaggagaaaataccgcatcaggcgccattcgccattcaggctgcgcaactgttgggaagggcgatcggtgcgggcctcttcgctattacgccagctggcgaaagggggatgtgctgcaaggcgattaagttgggtaacgccagggttttcccagtcacgacgttgtaaaacgacggccagagaattctcgcgatagggataacagggtaataaataatgtactagagacactttcaataaaggcaaatgcttttatttgtacactctcgggtgattatttacccccacccttgccgtctgcgccgtttaaaaatcaaaggggttctgccgcgcatcgctatgcgccactggcagggacacgttgcgatactggtgtttagtgctccacttaaactcaggcacaaccatccgcggcagctcggtgaagttttcactccacaggctgcgcaccatcaccaacgcgtttagcaggtcgggcgccgatatcttgaagtcgcagttggggcctccgccctgcgcgcgcgagttgcgatacacagggttgcagcactggaacactatcagcgccgggtggtgcacgctggccagcacgctcttgtcggagatcagatccgcgtccaggtcctccgcgttgctcagggcgaacggagtcaactttggtagctgccttcccaaaaagggcgcgtgcccaggctttgagttgcactcgcaccgtagtggcatcaaaaggtgaccgtgcccggtctgggcgttaggatacagcgcctgcataaaagccttgatctgcttaaaagccacctgagcctttgcgccttcagagaagaacatgccgcaagacttgccggaaaactgattggccggacaggccgcgtcgtgcacgcagcaccttgcgtcggtgttggagatctgcaccacatttcggccccaccggttcttcacgatcttggccttgctagactgctccttcagcgcgcgctgcccgttttcgctcgtcacatccatttcaatcacgtgctccttatttatcataatgcttccgtgtagacacttaagctcgccttcgatctcagcgcagcggtgcagccacaacgcgcagcccgtgggctcgtgatgcttgtaggtcacctctgcaaacgactgcaggtacgcctgcaggaatcgccccatcatcgtcacaaaggtcttgttgctggtgaaggtcagctgcaacccgcggtgctcctcgttcagccaggtcttgcatacggccgccagagcttccacttggtcaggcagtagtttgaagttcgcctttagatcgttatccacgtggtacttgtccatcagcgcgcgcgcagcctccatgcccttctcccacgcagacacgatcggcacactcagcgggttcatcaccgtaatttcactttccgcttcgctgggctcttcctcttcctcttgcgtccgcataccacgcgccactgggtcgtcttcattcagccgccgcactgtgcgcttacctcctttgccatgcttgattagcaccggtgggttgctgaaacccaccatttgtagcgccacatcttctctttcttcctcgctgtccacgattacctctggtgatggcgggcgctcgggcttgggagaagggcgcttctttttcttcttgggcgcaatggccaaatccgccgccgaggtcgatggccgcgggctgggtgtgcgcggcaccagcgcgtcttgtgatgagtcttcctcgtcctcggactcgatacgccgcctcatccgcttttttgggggcgcccggggaggcggcggcgacggggacggggacgacacgtcctccatggttgggggacgtcgcgccgcaccgcgtccgcgctcgggggtggtttcgcgctgctcctcttcccgactggccatttccttctcctataggcagaaaaagatcatggagtcagtcgagaagaaggacagcctaaccgccccctctgagttcgccaccaccgcctccaccgatgccgccaacgcgcctaccaccttccccgtcgaggcacccccgcttgaggaggaggaagtgattatcgagcaggacccaggttttgtaagcgaagacgacgaggaccgctcagtaccaacagaggataaaaagcaagaccaggacaacgcagaggcaaacgaggaacaagtcgggcggggggacgaaaggcatggcgactacctagatgtgggagacgacgtgctgttgaagcatctgcagcgccagtgcgccattatctgcgacgcgttgcaagagcgcagcgatgtgcccctcgccatagcggatgtcagccttgcctacgaacgccacctattctcaccgcgcgtaccccccaaacgccaagaaaacggcacatgcgagcccaacccgcgcctcaacttctaccccgtatttgccgtgccagaggtgcttgccacctatcacatctttttccaaaactgcaagatacccctatcctgccgtgccaaccgcagccgagcggacaagcagctggccttgcggcagggcgctgtcatacctgatatcgcctcgctcaacgaagtgccaaaaatctttgagggtcttggacgcgacgagaagcgcgcggcaaacgctctgcaacaggaaaacagcgaaaatgaaagtcactctggagtgttggtggaactcgagggtgacaacgcgcgcctagccgtactaaaacgcagcatcgaggtcacccactttgcctacccggcacttaacctaccccccaaggtcatgagcacagtcatgagtgagctgatcgtgcgccgtgcgcagcccctggagagggatgcaaatttgcaagaacaaacagaggagggcctacccgcagttggcgacgagcagctagcgcgctggcttcaaacgcgcgagcctgccgacttggaggagcgacgcaaactaatgatggccgcagtgctcgttaccgtggagcttgagtgcatgcagcggttctttgctgacccggagatgcagcgcaagctagaggaaacattgcactacacctttcgacagggctacgtacgccaggcctgcaagatctccaacgtggagctctgcaacctggtctcctaccttggaattttgcacgaaaaccgccttgggcaaaacgtgcttcattccacgctcaagggcgaggcgcgccgcgactacgtccgcgactgcgtttacttatttctatgctacacctggcagacggccatgggcgtttggcagcagtgcttggaggagtgcaacctcaaggagctgcagaaactgctaaagcaaaacttgaaggacctatggacggccttcaacgagcgctccgtggccgcgcacctggcggacatcattttccccgaacgcctgcttaaaaccctgcaacagggtctgccagacttcaccagtcaaagcatgttgcagaactttaggaactttatcctagagcgctcaggaatcttgcccgccacctgctgtgcacttcctagcgactttgtgcccattaagtaccgcgaatgccctccgccgctttggggccactgctaccttctgcagctagccaactaccttgcctaccactctgacataatggaagacgtgagcggtgacggtctactggagtgtcactgtcgctgcaacctatgcaccccgcaccgctccctggtttgcaattcgcagctgcttaacgaaagtcaaattatcggtacctttgagctgcagggtccctcgcctgacgaaaagtccgcggctccggggttgaaactcactccggggctgtggacgtcggcttaccttcgcaaatttgtacctgaggactaccacgcccacgagattaggttctacgaagaccaatcccgcccgcctaatgcggagcttaccgcctgcgtcattacccagggccacattcttggccaattgcaagccatcaacaaagcccgccaagagtttctgctacgaaagggacggggggtttacttggacccccagtccggcgaggagctcaacccaatccccccgccgccgcagccctatcagcagcagccgcgggcccttgcttcccaggatggcacccaaaaagaagctgcagctgccgccgccacccacggacgaggaggaatactgggacagtcaggcagaggaggttttggacgaggaggaggaggacatgatggaagactgggagagcctagacgaggaagcttccgaggtcgaagaggtgtcagacgaaacaccgtcaccctcggtcgcattcccctcgccggcgccccagaaatcggcaaccggttccagcatggctacaacctccgctcctcaggcgccgccggcactgcccgttcgccgacccaaccgtagatgggacaccactggaaccagggccggtaagtccaagcagccgccgccgttagcccaagagcaacaacagcgccaaggctaccgctcatggcgcgggcacaagaacgccatagttgcttgcttgcaagactgtgggggcaacatctccttcgcccgccgctttcttctctaccatcacggcgtggccttcccccgtaacatcctgcattactaccgtcatctctacagcccatactgcaccggcggcagcggcagcaacagcagcggccacacagaagcaaaggcgaccggatagcaagactctgacaaagcccaagaaatccacagcggcggcagcagcaggaggaggagcgctgcgtctggcgcccaacgaacccgtatcgacccgcgagcttagaaacaggatttttcccactctgtatgctatatttcaacagagcaggggccaagaacaagagctgaaaataaaaaacaggtctctgcgatccctcacccgcagctgcctgtatcacaaaagcgaagatcagcttcggcgcacgctggaagacgcggaggctctcttcagtaaatactgcgcgctgactcttaaggactagtttcgcgccctttctcaaatttaagcgcgaaaactacgtcatctccagcggccacacccggcgccagcacctgttgtcagcgccattttttagggcggagtaacttgtatgtgttgggaattgtagttttcttaaaatgggaagtgacgtaacgtgggaaaacggaagtgacgatttgaggaagttgtgggttttttggctttcgtttctgggcgtaggttcgcgtgcggttttctgggtgttttttgtggactttaaccgttacgtcattttttagtcctatatatactcgctctgcacttggcccttttttacactgtgactgattgagctggtgccgtgtcgagtggtgtttttttaataggttttcttttttactggtaaggctgactgttatgactacgtccggcgttccatttggcatgacactacgaccaacacgatctcggttgtctcggcgcactccgtacagtagggatcgtctacctccttttgagacagaaacccgcgctaccatactggaggatcatccgctgctgcccgaatgtaacactttgacaatgcacaacgtgagttacgtgcgaggtcttccctgcagtgtgggatttacgctgattcaggaatgggttgttccctgggatatggttctaacgcgggaggagcttgtaatcctgaggaagtgtatgcacgtgtgcctgtgttgtgccaacattgatatcatgacgagcatgatgatccatggttacgagtcctgggctctccactgtcattgttccagtcccggttccctgcagtgtatagccggcgggcaggttttggccagctggtttaggatggtggtggatggcgccatgtttaatcagaggtttatatggtaccgggaggtggtgaattacaacatgccaaaagaggtaatgtttatgtccagcgtgtttatgaggggtcgccacttaatctacctgcgcttgtggtatgatggccacgtgggttctgtggtccccgccatgagctttggatacagcgccttgcactgtgggattttgaacaatattgtggtgctgtgctgcagttactgtgctgatttaagtgagatcagggtgcgctgctgtgcccggaggacaaggcgccttatgctgcgggcggtgcgaatcatcgctgaggagaccactgccatgttgtattcctgcaggacggagcggcggcggcagcagtttattcgcgcgctgctgcagcaccaccgccctatcctgatgcacgattatgactctacccccatgtaggcgtggacttctccttcgccgcccgttaagcaaccgcaagttggacagcagcctgtggctcagcagctggacagcgacatgaacttaagtgagctgcccggggagtttattaatatcactgatgagcgtttggctcgacaggaaaccgtgtggaatataacacctaagaatatgtctgttacccatgatatgatgctttttaaggccagccggggagaaaggactgtgtactctgtgtgttgggagggaggtggcaggttgaatactagggttctgtgagtttgattaaggtacggtgatctgtataagctatgtggtggtggggctatactactgaatgaaaaatgacttgaaattttctgcaattgaaaaataaacacgttgaaacataacacaaacgattctttattcttgggcaatgtatgaaaaagtgtaagaggatgtggcaaatatttcattaatgtagttgtggccagaccagtcccatgaaaatgacatagagtatgcacttggagttgtgtctcctgtttcctgtgtaccgtttagtgtaatggttagtgttacaggtttagttttgtctccgtttaagtaaacttgactgacaatgttacttttggcagttttaccgtgagattttggataagctgataggttaggcataaatccaacagcgtttgtataggctgtcgcccctcctgacgcggtaggaggaggggagggtgccctgcatgtctgccgctgctcttgctcttgccgctgctgaggaggggggcgcatctgccgcagcaccggatgcatctgggaaaagcaaaaaaggggctcgtccctgtttccggaggaatttgcaagcggggtcttgcatgacggggaggcaaacccccgttcgccgcagtccggccggtccgagactcgaaccgggggtcccgcgactcaacccttggaaaataaccctccggctacagggagcgagccacttaatgctttcgctttccagcctaaccgcttacgctgcgcgcggccagtggccaaaaaagctagcgcagcagccgccgcgcctggaaggaagccaaaaggagcactcccccgttgtctgacgtcgcacacctgggttcgacacgcgggcggtaaccgcatggatcacggcggacggccggatacggggctcgaaccccggtcgtccgccatgatacccttgcgaatttatccaccagaccacggaagagtgcccgcttacaggctctccttttgcacggtctagagcgtcaacgattgcgcgcgcctgaccggccagagcgtcccgaccatggagcactttttgccgctgcgcaacatctggaaccgcgtccgcgactttccgcgcgcctccaccaccgccgccggcatcacctggatgtccaggtacatctacggatatggcaaacagctattatgggtattatgggtgcggccgcggatcccgggcccgtcgactgcagaggcctgcatgcaagcttggtgtaatcatggtcatagctgtttcctgtgtgaaattgttatccgctcacaattccacacaacatacgagccggaagcataaagtgtaaagcctggggtgcctaatgagtgagctaactcacattaattgcgttgcgctcactgcccgctttccagtcgggaaacctgtcgtgccagctgcattaatgaatcggccaacgcgcggggagaggcggtttgcgtattgggcgctcttccgcttcctcgctcactgactcgctgcgctcggtcgttcggctgcggcgagcggtatcagctcactcaaaggcggtaatacggttatccacagaatcaggggataacgcaggaaagaacatgtgagcaaaaggccagcaaaaggccaggaaccgtaaaaaggccgcgttgctggcgtttttccataggctccgcccccctgacgagcatcacaaaaatcgacgctcaagtcagaggtggcgaaacccgacaggactataaagataccaggcgtttccccctggaagctccctcgtgcgctctcctgttccgaccctgccgcttaccggatacctgtccgcctttctcccttcgggaagcgtggcgctttctcatagctcacgctgtaggtatctcagttcggtgtaggtcgttcgctccaagctgggctgtgtgcacgaaccccccgttcagcccgaccgctgcgccttatccggtaactatcgtcttgagtccaacccggtaagacacgacttatcgccactggcagcagccactggtaacaggattagcagagcgaggtatgtaggcggtgctacagagttcttgaagtggtggcctaactacggctacactagaagaacagtatttggtatctgcgctctgctgaagccagttaccttcggaaaaagagttggtagctcttgatccggcaaacaaaccaccgctggtagcggtggtttttttgtttgcaagcagcagattacgcgcagaaaaaaaggatctcaagaagatcctttgatcttttctacggggtctgacgctcagtggaacgaaaactcacgttaagggattttggtcatgagattatcaaaaaggatcttcacctagatccttttaaattaaaaatgaagttttaaatcaagcccaatctgaataatgttacaaccaattaaccaattctgattagaaaaactcatcgagcatcaaatgaaactgcaatttattcatatcaggattatcaataccatatttttgaaaaagccgtttctgtaatgaaggagaaaactcaccgaggcagttccataggatggcaagatcctggtatcggtctgcgattccgactcgtccaacatcaatacaacctattaatttcccctcgtcaaaaataaggttatcaagtgagaaatcaccatgagtgacgactgaatccggtgagaatggcaaaagtttatgcatttctttccagacttgttcaacaggccagccattacgctcgtcatcaaaatcactcgcatcaaccaaaccgttattcattcgtgattgcgcctgagcgagacgaaatacgcgatcgctgttaaaaggacaattacaaacaggaatcgaatgcaaccggcgcaggaacactgccagcgcatcaacaatattttcacctgaatcaggatattcttctaatacctggaatgctgtttttccggggatcgcagtggtgagtaaccatgcatcatcaggagtacggataaaatgcttgatggtcggaagaggcataaattccgtcagccagtttagtctgaccatctcatctgtaacatcattggcaacgctacctttgccatgtttcagaaacaactctggcgcatcgggcttcccatacaagcgatagattgtcgcacctgattgcccgacattatcgcgagcccatttatacccatataaatcagcatccatgttggaatttaatcgcggcctcgacgtttcccgttgaatatggctcataacaccccttgtattactgtttatgtaagcagacagttttattgttcatgatgatatatttttatcttgtgcaatgtaacatcagagattttgagacacgggccagagctgca

SEQ ID NO: 38 - DNA, 11926 bp, synthetic construct
  source 1..11926: mol_type = other DNA
tcgcgcgtttcggtgatgacggtgaaaacctctgacacatgcagctcccggagacggtcacagcttgtctgtaagcggatgccgggagcagacaagcccgtcagggcgcgtcagcgggtgttggcgggtgtcggggctggcttaactatgcggcatcagagcagattgtactgagagtgcaccatatgcggtgtgaaataccgcacagatgcgtaaggagaaaataccgcatcaggcgccattcgccattcaggctgcgcaactgttgggaagggcgatcggtgcgggcctcttcgctattacgccagctggcgaaagggggatgtgctgcaaggcgattaagttgggtaacgccagggttttcccagtcacgacgttgtaaaacgacggccagagaattctcgcgatagggataacagggtaataaataatgtactagagacactttcaataaaggcaaatgcttttatttgtacactctcgggtgattatttacccccacccttgccgtctgcgccgtttaaaaatcaaaggggttctgccgcgcatcgctatgcgccactggcagggacacgttgcgatactggtgtttagtgctccacttaaactcaggcacaaccatccgcggcagctcggtgaagttttcactccacaggctgcgcaccatcaccaacgcgtttagcaggtcgggcgccgatatcttgaagtcgcagttggggcctccgccctgcgcgcgcgagttgcgatacacagggttgcagcactggaacactatcagcgccgggtggtgcacgctggccagcacgctcttgtcggagatcagatccgcgtccaggtcctccgcgttgctcagggcgaacggagtcaactttggtagctgccttcccaaaaagggcgcgtgcccaggctttgagttgcactcgcaccgtagtggcatcaaaaggtgaccgtgcccggtctgggcgttaggatacagcgcctgcataaaagccttgatctgcttaaaagccacctgagcctttgcgccttcagagaagaacatgccgcaagacttgccggaaaactgattggccggacaggccgcgtcgtgcacgcagcaccttgcgtcggtgttggagatctgcaccacatttcggccccaccggttcttcacgatcttggccttgctagactgctccttcagcgcgcgctgcccgttttcgctcgtcacatccatttcaatcacgtgctccttatttatcataatgcttccgtgtagacacttaagctcgccttcgatctcagcgcagcggtgcagccacaacgcgcagcccgtgggctcgtgatgcttgtaggtcacctctgcaaacgactgcaggtacgcctgcaggaatcgccccatcatcgtcacaaaggtcttgttgctggtgaaggtcagctgcaacccgcggtgctcctcgttcagccaggtcttgcatacggccgccagagcttccacttggtcaggcagtagtttgaagttcgcctttagatcgttatccacgtggtacttgtccatcagcgcgcgcgcagcctccatgcccttctcccacgcagacacgatcggcacactcagcgggttcatcaccgtaatttcactttccgcttcgctgggctcttcctcttcctcttgcgtccgcataccacgcgccactgggtcgtcttcattcagccgccgcactgtgcgcttacctcctttgccatgcttgattagcaccggtgggttgctgaaacccaccatttgtagcgccacatcttctctttcttcctcgctgtccacgattacctctggtgatggcgggcgctcgggcttgggagaagggcgcttctttttcttcttgggcgcaatggccaaatccgccgccgaggtcgatggccgcgggctgggtgtgcgcggcaccagcgcgtcttgtgatgagtcttcctcgtcctcggactcgatacgccgcctcatccgcttttttgggggcgcccggggaggcggcggcgacggggacggggacgacacgtcctccatggttgggggacgtcgcgccgcaccgcgtccgcgctcgggggtggtttcgcgctgctcctcttcccgactggccatttccttctcctataggcagaaaaagatcatggagtcagtcgagaagaaggacagcctaaccgccccctctgagttcgccaccaccgcctccaccgatgccgccaacgcgcctaccaccttccccgtcgaggcacccccgcttgaggaggaggaagtgattatcgagcaggacccaggttttgtaagcgaagacgacgaggaccgctcagtaccaacagaggataaaaagcaagaccaggacaacgcagaggcaaacgaggaacaagtcgggcggggggacgaaaggcatggcgactacctagatgtgggagacgacgtgctgttgaagcatctgcagcgccagtgcgccattatctgcgacgcgttgcaagagcgcagcgatgtgcccctcgccatagcggatgtcagccttgcctacgaacgccacctattctcaccgcgcgtaccccccaaacgccaagaaaacggcacatgcgagcccaacccgcgcctcaacttctaccccgtatttgccgtgccagaggtgcttgccacctatcacatctttttccaaaactgcaagatacccctatcctgccgtgccaaccgcagccgagcggacaagcagctggccttgcggcagggcgctgtcatacctgatatcgcctcgctcaacgaagtgccaaaaatctttgagggtcttggacgcgacgagaagcgcgcggcaaacgctctgcaacaggaaaacagcgaaaatgaaagtcactctggagtgttggtggaactcgagggtgacaacgcgcgcctagccgtactaaaacgcagcatcgaggtcacccactttgcctacccggcacttaacctaccccccaaggtcatgagcacagtcatgagtgagctgatcgtgcgccgtgcgcagcccctggagagggatgcaaatttgcaagaacaaacagaggagggcctacccgcagttggcgacgagcagctagcgcgctggcttcaaacgcgcgagcctgccgacttggaggagcgacgcaaactaatgatggccgcagtgctcgttaccgtggagcttgagtgcatgcagcggttctttgctgacccggagatgcagcgcaagctagaggaaacattgcactacacctttcgacagggctacgtacgccaggcctgcaagatctccaacgtggagctctgcaacctggtctcctaccttggaattttgcacgaaaaccgccttgggcaaaacgtgcttcattccacgctcaagggcgaggcgcgccgcgactacgtccgcgactgcgtttacttatttctatgctacacctggcagacggccatgggcgtttggcagcagtgcttggaggagtgcaacctcaaggagctgcagaaactgctaaagcaaaacttgaaggacctatggacggccttcaacgagcgctccgtggccgcgcacctggcggacatcattttccccgaacgcctgcttaaaaccctgcaacagggtctgccagacttcaccagtcaaagcatgttgcagaactttaggaactttatcctagagcgctcaggaatcttgcccgccacctgctgtgcacttcctagcgactttgtgcccattaagtaccgcgaatgccctccgccgctttggggccactgctaccttctgcagctagccaactaccttgcctaccactctgacataatggaagacgtgagcggtgacggtctactggagtgtcactgtcgctgcaacctatgcaccccgcaccgctccctggtttgcaattcgcagctgcttaacgaaagtcaaattatcggtacctttgagctgcagggtccctcgcctgacgaaaagtccgcggctccggggttgaaactcactccggggctgtggacgtcggcttaccttcgcaaatttgtacctgaggactaccacgcccacgagattaggttctacgaagaccaatcccgcccgcctaatgcggagcttaccgcctgcgtcattacccagggccacattcttggccaattgcaagccatcaacaaagcccgccaagagtttctgctacgaaagggacggggggtttacttggacccccagtccggcgaggagctcaacccaatccccccgccgccgcagccctatcagcagcagccgcgggcccttgcttcccaggatggcacccaaaaagaagctgcagctgccgccgccacccacggacgaggaggaatactgggacagtcaggcagaggaggttttggacgaggaggaggaggacatgatggaagactgggagagcctagacgaggaagcttccgaggtcgaagaggtgtcagacgaaacaccgtcaccctcggtcgcattcccctcgccggcgccccagaaatcggcaaccggttccagcatggctacaacctccgctcctcaggcgccgccggcactgcccgttcgccgacccaaccgtagatgggacaccactggaaccagggccggtaagtccaagcagccgccgccgttagcccaagagcaacaacagcgccaaggctaccgctcatggcgcgggcacaagaacgccatagttgcttgcttgcaagactgtgggggcaacatctccttcgcccgccgctttcttctctaccatcacggcgtggccttcccccgtaacatcctgcattactaccgtcatctctacagcccatactgcaccggcggcagcggcagcaacagcagcggccacacagaagcaaaggcgaccggatagcaagactctgacaaagcccaagaaatccacagcggcggcagcagcaggaggaggagcgctgcgtctggcgcccaacgaacccgtatcgacccgcgagcttagaaacaggatttttcccactctgtatgctatatttcaacagagcaggggccaagaacaagagctgaaaataaaaaacaggtctctgcgatccctcacccgcagctgcctgtatcacaaaagcgaagatcagcttcggcgcacgctggaagacgcggaggctctcttcagtaaatactgcgcgctgactcttaaggactagtttcgcgccctttctcaaatttaagcgcgaaaactacgtcatctccagcggccacacccggcgccagcacctgttgtcagcgccattttttagggcggagtaacttgtatgtgttgggaattgtagttttcttaaaatgggaagtgacgtaacgtgggaaaacggaagtgacgatttgaggaagttgtgggttttttggctttcgtttctgggcgtaggttcgcgtgcggttttctgggtgttttttgtggactttaaccgttacgtcattttttagtcctatatatactcgctctgcacttggcccttttttacactgtgactgattgagctggtgccgtgtcgagtggtgtttttttaataggttttcttttttactggtaaggctgactgttatgactacgtccggcgttccatttggcatgacactacgaccaacacgatctcggttgtctcggcgcactccgtacagtagggatcgtctacctccttttgagacagaaacccgcgctaccatactggaggatcatccgctgctgcccgaatgtaacactttgacaatgcacaacgtgagttacgtgcgaggtcttccctgcagtgtgggatttacgctgattcaggaatgggttgttccctgggatatggttctaacgcgggaggagcttgtaatcctgaggaagtgtatgcacgtgtgcctgtgttgtgccaacattgatatcatgacgagcatgatgatccatggttacgagtcctgggctctccactgtcattgttccagtcccggttccctgcagtgtatagccggcgggcaggttttggccagctggtttaggatggtggtggatggcgccatgtttaatcagaggtttatatggtaccgggaggtggtgaattacaacatgccaaaagaggtaatgtttatgtccagcgtgtttatgaggggtcgccacttaatctacctgcgcttgtggtatgatggccacgtgggttctgtggtccccgccatgagctttggatacagcgccttgcactgtgggattttgaacaatattgtggtgctgtgctgcagttactgtgctgatttaagtgagatcagggtgcgctgctgtgcccggaggacaaggcgccttatgctgcgggcggtgcgaatcatcgctgaggagaccactgccatgttgtattcctgcaggacggagcggcggcggcagcagtttattcgcgcgctgctgcagcaccaccgccctatcctgatgcacgattatgactctacccccatgtaggcgtggacttctccttcgccgcccgttaagcaaccgcaagttggacagcagcctgtggctcagcagctggacagcgacatgaacttaagtgagctgcccggggagtttattaatatcactgatgagcgtttggctcgacaggaaaccgtgtggaatataacacctaagaatatgtctgttacccatgatatgatgctttttaaggccagccggggagaaaggactgtgtactctgtgtgttgggagggaggtggcaggttgaatactagggttctgtgagtttgattaaggtacggtgatctgtataagctatgtggtggtggggctatactactgaatgaaaaatgacttgaaattttctgcaattgaaaaataaacacgttgaaacataacacaaacgattctttattcttgggcaatgtatgaaaaagtgtaagaggatgtggcaaatatttcattaatgtagttgtggccagaccagtcccatgaaaatgacatagagtatgcacttggagttgtgtctcctgtttcctgtgtaccgtttagtgtaatggttagtgttacaggtttagttttgtctccgtttaagtaaacttgactgacaatgttacttttggcagttttaccgtgagattttggataagctgataggttaggcataaatccaacagcgtttgtataggctgtcgacattgattattgactagttattaatagtaatcaattacggggtcattagttcatagcccatatatggagttccgcgttacataacttacggtaaatggcccgcctggctgaccgcccaacgacccccgcccattgacgtcaataatgacgtatgttcccatagtaacgccaatagggactttccattgacgtcaatgggtggagtatttacggtaaactgcccacttggcagtacatcaagtgtatcatatgccaagtacgccccctattgacgtcaatgacggtaaatggcccgcctggcattatgcccagtacatgaccttatgggactttcctacttggcagtacatctacgtattagtcatcgctattaccatggtgatgcggttttggcagtacatcaatgggcgtggatagcggtttgactcacggggatttccaagtctccaccccattgacgtcaatgggagtttgttttggcaccaaaatcaacgggactttccaaaatgtcgtaacaactccgccccattgacgcaaatgggcggtaggcgtgtacggtgggaggtctatataagcagagctctctggctaactagagaacccactgcttactggcttatcgaaattaatacgactcactatagggagacccaagctgatgagacatattatctgccacggaggtgttattaccgaagaaatggccgccagtcttttggaccagctgatcgaagaggtactggctgataatcttccacctcctagccattttgaaccacctacccttcacgaactgtatgatttagacgtgacggcccccgaagatcccaacgaggaggcggtttcgcagatttttcccgactctgtaatgttggcggtgcaggaagggattgacttactcacttttccgccggcgcccggttctccggagccgcctcacctttcccggcagcccgagcagccggagcagagagccttgggtccggtttctatgccaaaccttgtaccggaggtgatcgatcttacctgccacgaggctggctttccacccagtgacgacgaggatgaagagggtgaggagtttgtgttagattatgtggagcaccccgggcacggttgcaggtcttgtcattatcaccggaggaatacgggggacccagatattatgtgttcgctttgctatatgaggacctgtggcatgtttgtctacagtaagtgaaaattatgggcagtgggtgatagagtggtgggtttggtgtggtaattttttttttaatttttacagttttgtggtttaaagaattttgtattgtgatttttttaaaaggtcctgtgtctgaacctgagcctgagcccgagccagaaccggagcctgcaagacctacccgccgtcctaaaatggcgcctgctatcctgagacgcccgacatcacctgtgtctagagaatgcaatagtagtacggatagctgtgactccggtccttctaacacacctcctgagatacacccggtggtcccgctgtgccccattaaaccagttgccgtgagagttggtgggcgtcgccaggctgtggaatgtatcgaggacttgcttaacgagcctgggcaacctttggacttgagctgtaaacgccccaggccataaaaacccgctgatcagcctcgactgtgccttctagttgccagccatctgttgtttgcccctcccccgtgccttccttgaccctggaaggtgccactcccactgtcctttcctaataaaatgaggaaattgcatcgcattgtctgagtaggtgtcattctattctggggggtggggtggggcaggacagcaagggggaggattgggaagacaatagcaggcatgctggggatgcggtgggctctatgggcccctcctgacgcggtaggaggaggggagggtgccctgcatgtctgccgctgctcttgctcttgccgctgctgaggaggggggcgcatctgccgcagcaccggatgcatctgggaaaagcaaaaaaggggctcgtccctgtttccggaggaatttgcaagcggggtcttgcatgacggggaggcaaacccccgttcgccgcagtccggccggtccgagactcgaaccgggggtcccgcgactcaacccttggaaaataaccctccggctacagggagcgagccacttaatgctttcgctttccagcctaaccgcttacgctgcgcgcggccagtggccaaaaaagctagcgcagcagccgccgcgcctggaaggaagccaaaaggagcactcccccgttgtctgacgtcgcacacctgggttcgacacgcgggcggtaaccgcatggatcacggcggacggccggatacggggctcgaaccccggtcgtccgccatgatacccttgcgaatttatccaccagaccacggaagagtgcccgcttacaggctctccttttgcacggtctagagcgtcaacgattgcgcgcgcctgaccggccagagcgtcccgaccatggagcactttttgccgctgcgcaacatctggaaccgcgtccgcgactttccgcgcgcctccaccaccgccgccggcatcacctggatgtccaggtacatctacggatatggcaaacagctattatgggtattatgggtgcggccgcggatcccgggcccgtcgactgcagaggcctgcatgcaagcttggtgtaatcatggtcatagctgtttcctgtgtgaaattgttatccgctcacaattccacacaacatacgagccggaagcataaagtgtaaagcctggggtgcctaatgagtgagctaactcacattaattgcgttgcgctcactgcccgctttccagtcgggaaacctgtcgtgccagctgcattaatgaatcggccaacgcgcggggagaggcggtttgcgtattgggcgctcttccgcttcctcgctcactgactcgctgcgctcggtcgttcggctgcggcgagcggtatcagctcactcaaaggcggtaatacggttatccacagaatcaggggataacgcaggaaagaacatgtgagcaaaaggccagcaaaaggccaggaaccgtaaaaaggccgcgttgctggcgtttttccataggctccgcccccctgacgagcatcacaaaaatcgacgctcaagtcagaggtggcgaaacccgacaggactataaagataccaggcgtttccccctggaagctccctcgtgcgctctcctgttccgaccctgccgcttaccggatacctgtccgcctttctcccttcgggaagcgtggcgctttctcatagctcacgctgtaggtatctcagttcggtgtaggtcgttcgctccaagctgggctgtgtgcacgaaccccccgttcagcccgaccgctgcgccttatccggtaactatcgtcttgagtccaacccggtaagacacgacttatcgccactggcagcagccactggtaacaggattagcagagcgaggtatgtaggcggtgctacagagttcttgaagtggtggcctaactacggctacactagaagaacagtatttggtatctgcgctctgctgaagccagttaccttcggaaaaagagttggtagctcttgatccggcaaacaaaccaccgctggtagcggtggtttttttgtttgcaagcagcagattacgcgcagaaaaaaaggatctcaagaagatcctttgatcttttctacggggtctgacgctcagtggaacgaaaactcacgttaagggattttggtcatgagattatcaaaaaggatcttcacctagatccttttaaattaaaaatgaagttttaaatcaagcccaatctgaataatgttacaaccaattaaccaattctgattagaaaaactcatcgagcatcaaatgaaactgcaatttattcatatcaggattatcaataccatatttttgaaaaagccgtttctgtaatgaaggagaaaactcaccgaggcagttccataggatggcaagatcctggtatcggtctgcgattccgactcgtccaacatcaatacaacctattaatttcccctcgtcaaaaataaggttatcaagtgagaaatcaccatgagtgacgactgaatccggtgagaatggcaaaagtttatgcatttctttccagacttgttcaacaggccagccattacgctcgtcatcaaaatcactcgcatcaaccaaaccgttattcattcgtgattgcgcctgagcgagacgaaatacgcgatcgctgttaaaaggacaattacaaacaggaatcgaatgcaaccggcgcaggaacactgccagcgcatcaacaatattttcacctgaatcaggatattcttctaatacctggaatgctgtttttccggggatcgcagtggtgagtaaccatgcatcatcaggagtacggataaaatgcttgatggtcggaagaggcataaattccgtcagccagtttagtctgaccatctcatctgtaacatcattggcaacgctacctttgccatgtttcagaaacaactctggcgcatcgggcttcccatacaagcgatagattgtcgcacctgattgcccgacattatcgcgagcccatttatacccatataaatcagcatccatgttggaatttaatcgcggcctcgacgtttcccgttgaatatggctcataacaccccttgtattactgtttatgtaagcagacagttttattgttcatgatgatatatttttatcttgtgcaatgtaacatcagagattttgagacacgggccagagctgca

SEQ ID NO: 39 - DNA, 8208 bp, synthetic construct
  source 1..8208: mol_type = other DNA
tcgcgcgtttcggtgatgacggtgaaaacctctgacacatgcagctcccggagacggtcacagcttgtctgtaagcggatgccgggagcagacaagcccgtcagggcgcgtcagcgggtgttggcgggtgtcggggctggcttaactatgcggcatcagagcagattgtactgagagtgcaccatatgcggtgtgaaataccgcacagatgcgtaaggagaaaataccgcatcaggcgccattcgccattcaggctgcgcaactgttgggaagggcgatcggtgcgggcctcttcgctattacgccagctggcgaaagggggatgtgctgcaaggcgattaagttgggtaacgccagggttttcccagtcacgacgttgtaaaacgacggccagagaattctcgcgatagggataacagggtaataaataatgtactagagacactttcaataaaggcaaatgcttttatttgtacactctcgggtgattatttacccccacccttgccgtctgcgccgtttaaaaatcaaaggggttctgccgcgcatcgctatgcgccactggcagggacacgttgcgatactggtgtttagtgctccacttaaactcaggcacaaccatccgcggcagctcggtgaagttttcactccacaggctgcgcaccatcaccaacgcgtttagcaggtcgggcgccgatatcttgaagtcgcagttggggcctccgccctgcgcgcgcgagttgcgatacacagggttgcagcactggaacactatcagcgccgggtggtgcacgctggccagcacgctcttgtcggagatcagatccgcgtccaggtcctccgcgttgctcagggcgaacggagtcaactttggtagctgccttcccaaaaagggcgcgtgcccaggctttgagttgcactcgcaccgtagtggcatcaaaaggtgaccgtgcccggtctgggcgttaggatacagcgcctgcataaaagccttgatctgcttaaaagccacctgagcctttgcgccttcagagaagaacatgccgcaagacttgccggaaaactgattggccggacaggccgcgtcgtgcacgcagcaccttgcgtcggtgttggagatctgcaccacatttcggccccaccggttcttcacgatcttggccttgctagactgctccttcagcgcgcgctgcccgttttcgctcgtcacatccatttcaatcacgtgctccttatttatcataatgcttccgtgtagacacttaagctcgccttcgatctcagcgcagcggtgcagccacaacgcgcagcccgtgggctcgtgatgcttgtaggtcacctctgcaaacgactgcaggtacgcctgcaggaatcgccccatcatcgtcacaaaggtcttgttgctggtgaaggtcagctgcaacccgcggtgctcctcgttcagccaggtcttgcatacggccgccagagcttccacttggtcaggcagtagtttgaagttcgcctttagatcgttatccacgtggtacttgtccatcagcgcgcgcgcagcctccatgcccttctcccacgcagacacgatcggcacactcagcgggttcatcaccgtaatttcactttccgcttcgctgggctcttcctcttcctcttgcgtccgcataccacgcgccactgggtcgtcttcattcagccgccgcactgtgcgcttacctcctttgccatgcttgattagcaccggtgggttgctgaaacccaccatttgtagcgccacatcttctctttcttcctcgctgtccacgattacctctggtgatggcgggcgctcgggcttgggagaagggcgcttctttttcttcttgggcgcaatggccaaatccgccgccgaggtcgatggccgcgggctgggtgtgcgcggcaccagcgcgtcttgtgatgagtcttcctcgtcctcggactcgatacgccgcctcatccgcttttttgggggcgcccggggaggcggcggcgacggggacggggacgacacgtcctccatggttgggggacgtcgcgccgcaccgcgtccgcgctcgggggtggtttcgcgctgctcctcttcccgactggccatttccttctcctataggcagaaaaagatcgttgaaactcactccggggctgtggacgtcggcttaccttcgcaaatttgtacctgaggactaccacgcccacgagattaggttctacgaagaccaatcccgcccgcctaatgcggagcttaccgcctgcgtcattacccagggccacattcttggccaattgcaagccatcaacaaagcccgccaagagtttctgctacgaaagggacggggggtttacttggacccccagtccggcgaggagctcaacccaatccccccgccgccgcagccctatcagcagcagccgcgggcccttgcttcccaggatggcacccaaaaagaagctgcagctgccgccgccacccacggacgaggaggaatactgggacagtcaggcagaggaggttttggacgaggaggaggaggacatgatggaagactgggagagcctagacgaggaagcttccgaggtcgaagaggtgtcagacgaaacaccgtcaccctcggtcgcattcccctcgccggcgccccagaaatcggcaaccggttccagcatggctacaacctccgctcctcaggcgccgccggcactgcccgttcgccgacccaaccgtagatgggacaccactggaaccagggccggtaagtccaagcagccgccgccgttagcccaagagcaacaacagcgccaaggctaccgctcatggcgcgggcacaagaacgccatagttgcttgcttgcaagactgtgggggcaacatctccttcgcccgccgctttcttctctaccatcacggcgtggccttcccccgtaacatcctgcattactaccgtcatctctacagcccatactgcaccggcggcagcggcagcaacagcagcggccacacagaagcaaaggcgaccggatagcaagactctgacaaagcccaagaaatccacagcggcggcagcagcaggaggaggagcgctgcgtctggcgcccaacgaacccgtatcgacccgcgagcttagaaacaggatttttcccactctgtatgctatatttcaacagagcaggggccaagaacaagagctgaaaataaaaaacaggtctctgcgatccctcacccgcagctgcctgtatcacaaaagcgaagatcagcttcggcgcacgctggaagacgcggaggctctcttcagtaaatactgcgcgctgactcttaaggactagtttcgcgccctttctcaaatttaagcgcgaaaactacgtcatctccagcggccacacccggcgccagcacctgttgtcagcgccattttttagggcggagtaacttgtatgtgttgggaattgtagttttcttaaaatgggaagtgacgtaacgtgggaaaacggaagtgacgatttgaggaagttgtgggttttttggctttcgtttctgggcgtaggttcgcgtgcggttttctgggtgttttttgtggactttaaccgttacgtcattttttagtcctatatatactcgctctgcacttggcccttttttacactgtgactgattgagctggtgccgtgtcgagtggtgtttttttaataggttttcttttttactggtaaggctgactgttatgactacgtccggcgttccatttggcatgacactacgaccaacacgatctcggttgtctcggcgcactccgtacagtagggatcgtctacctccttttgagacagaaacccgcgctaccatactggaggatcatccgctgctgcccgaatgtaacactttgacaatgcacaacgtgagttacgtgcgaggtcttccctgcagtgtgggatttacgctgattcaggaatgggttgttccctgggatatggttctaacgcgggaggagcttgtaatcctgaggaagtgtatgcacgtgtgcctgtgttgtgccaacattgatatcatgacgagcatgatgatccatggttacgagtcctgggctctccactgtcattgttccagtcccggttccctgcagtgtatagccggcgggcaggttttggccagctggtttaggatggtggtggatggcgccatgtttaatcagaggtttatatggtaccgggaggtggtgaattacaacatgccaaaagaggtaatgtttatgtccagcgtgtttatgaggggtcgccacttaatctacctgcgcttgtggtatgatggccacgtgggttctgtggtccccgccatgagctttggatacagcgccttgcactgtgggattttgaacaatattgtggtgctgtgctgcagttactgtgctgatttaagtgagatcagggtgcgctgctgtgcccggaggacaaggcgccttatgctgcgggcggtgcgaatcatcgctgaggagaccactgccatgttgtattcctgcaggacggagcggcggcggcagcagtttattcgcgcgctgctgcagcaccaccgccctatcctgatgcacgattatgactctacccccatgtaggcgtggacttctccttcgccgcccgttaagcaaccgcaagttggacagcagcctgtggctcagcagctggacagcgacatgaacttaagtgagctgcccggggagtttattaatatcactgatgagcgtttggctcgacaggaaaccgtgtggaatataacacctaagaatatgtctgttacccatgatatgatgctttttaaggccagccggggagaaaggactgtgtactctgtgtgttgggagggaggtggcaggttgaatactagggttctgtgagtttgattaaggtacggtgatctgtataagctatgtggtggtggggctatactactgaatgaaaaatgacttgaaattttctgcaattgaaaaataaacacgttgaaacataacacaaacgattctttattcttgggcaatgtatgaaaaagtgtaagaggatgtggcaaatatttcattaatgtagttgtggccagaccagtcccatgaaaatgacatagagtatgcacttggagttgtgtctcctgtttcctgtgtaccgtttagtgtaatggttagtgttacaggtttagttttgtctccgtttaagtaaacttgactgacaatgttacttttggcagttttaccgtgagattttggataagctgataggttaggcataaatccaacagcgtttgtataggctgtcgcccctcctgacgcggtaggaggaggggagggtgccctgcatgtctgccgctgctcttgctcttgccgctgctgaggaggggggcgcatctgccgcagcaccggatgcatctgggaaaagcaaaaaaggggctcgtccctgtttccggaggaatttgcaagcggggtcttgcatgacggggaggcaaacccccgttcgccgcagtccggccggtccgagactcgaaccgggggtcccgcgactcaacccttggaaaataaccctccggctacagggagcgagccacttaatgctttcgctttccagcctaaccgcttacgctgcgcgcggccagtggccaaaaaagctagcgcagcagccgccgcgcctggaaggaagccaaaaggagcactcccccgttgtctgacgtcgcacacctgggttcgacacgcgggcggtaaccgcatggatcacggcggacggccggatacggggctcgaaccccggtcgtccgccatgatacccttgcgaatttatccaccagaccacggaagagtgcccgcttacaggctctccttttgcacggtctagagcgtcaacgattgcgcgcgcctgaccggccagagcgtcccgaccatggagcactttttgccgctgcgcaacatctggaaccgcgtccgcgactttccgcgcgcctccaccaccgccgccggcatcacctggatgtccaggtacatctacggatatggcaaacagctattatgggtattatgggtgcggccgcggatcccgggcccgtcgactgcagaggcctgcatgcaagcttggtgtaatcatggtcatagctgtttcctgtgtgaaattgttatccgctcacaattccacacaacatacgagccggaagcataaagtgtaaagcctggggtgcctaatgagtgagctaactcacattaattgcgttgcgctcactgcccgctttccagtcgggaaacctgtcgtgccagctgcattaatgaatcggccaacgcgcggggagaggcggtttgcgtattgggcgctcttccgcttcctcgctcactgactcgctgcgctcggtcgttcggctgcggcgagcggtatcagctcactcaaaggcggtaatacggttatccacagaatcaggggataacgcaggaaagaacatgtgagcaaaaggccagcaaaaggccaggaaccgtaaaaaggccgcgttgctggcgtttttccataggctccgcccccctgacgagcatcacaaaaatcgacgctcaagtcagaggtggcgaaacccgacaggactataaagataccaggcgtttccccctggaagctccctcgtgcgctctcctgttccgaccctgccgcttaccggatacctgtccgcctttctcccttcgggaagcgtggcgctttctcatagctcacgctgtaggtatctcagttcggtgtaggtcgttcgctccaagctgggctgtgtgcacgaaccccccgttcagcccgaccgctgcgccttatccggtaactatcgtcttgagtccaacccggtaagacacgacttatcgccactggcagcagccactggtaacaggattagcagagcgaggtatgtaggcggtgctacagagttcttgaagtggtggcctaactacggctacactagaagaacagtatttggtatctgcgctctgctgaagccagttaccttcggaaaaagagttggtagctcttgatccggcaaacaaaccaccgctggtagcggtggtttttttgtttgcaagcagcagattacgcgcagaaaaaaaggatctcaagaagatcctttgatcttttctacggggtctgacgctcagtggaacgaaaactcacgttaagggattttggtcatgagattatcaaaaaggatcttcacctagatccttttaaattaaaaatgaagttttaaatcaagcccaatctgaataatgttacaaccaattaaccaattctgattagaaaaactcatcgagcatcaaatgaaactgcaatttattcatatcaggattatcaataccatatttttgaaaaagccgtttctgtaatgaaggagaaaactcaccgaggcagttccataggatggcaagatcctggtatcggtctgcgattccgactcgtccaacatcaatacaacctattaatttcccctcgtcaaaaataaggttatcaagtgagaaatcaccatgagtgacgactgaatccggtgagaatggcaaaagtttatgcatttctttccagacttgttcaacaggccagccattacgctcgtcatcaaaatcactcgcatcaaccaaaccgttattcattcgtgattgcgcctgagcgagacgaaatacgcgatcgctgttaaaaggacaattacaaacaggaatcgaatgcaaccggcgcaggaacactgccagcgcatcaacaatattttcacctgaatcaggatattcttctaatacctggaatgctgtttttccggggatcgcagtggtgagtaaccatgcatcatcaggagtacggataaaatgcttgatggtcggaagaggcataaattccgtcagccagtttagtctgaccatctcatctgtaacatcattggcaacgctacctttgccatgtttcagaaacaactctggcgcatcgggcttcccatacaagcgatagattgtcgcacctgattgcccgacattatcgcgagcccatttatacccatataaatcagcatccatgttggaatttaatcgcggcctcgacgtttcccgttgaatatggctcataacaccccttgtattactgtttatgtaagcagacagttttattgttcatgatgatatatttttatcttgtgcaatgtaacatcagagattttgagacacgggccagagctgca

SEQ ID NO: 40 - DNA, 8208 bp, synthetic construct
  source 1..8208: mol_type = other DNA
tcgcgcgtttcggtgatgacggtgaaaacctctgacacatgcagctcccggagacggtcacagcttgtctgtaagcggatgccgggagcagacaagcccgtcagggcgcgtcagcgggtgttggcgggtgtcggggctggcttaactatgcggcatcagagcagattgtactgagagtgcaccatatgcggtgtgaaataccgcacagatgcgtaaggagaaaataccgcatcaggcgccattcgccattcaggctgcgcaactgttgggaagggcgatcggtgcgggcctcttcgctattacgccagctggcgaaagggggatgtgctgcaaggcgattaagttgggtaacgccagggttttcccagtcacgacgttgtaaaacgacggccagagaattctcgcgatagggataacagggtaataaataatgtactagagacactttcaataaaggcaaatgcttttatttgtacactctcgggtgattatttacccccacccttgccgtctgcgccgtttaaaaatcaaaggggttctgccgcgcatcgctatgcgccactggcagggacacgttgcgatactggtgtttagtgctccacttaaactcaggcacaaccatccgcggcagctcggtgaagttttcactccacaggctgcgcaccatcaccaacgcgtttagcaggtcgggcgccgatatcttgaagtcgcagttggggcctccgccctgcgcgcgcgagttgcgatacacagggttgcagcactggaacactatcagcgccgggtggtgcacgctggccagcacgctcttgtcggagatcagatccgcgtccaggtcctccgcgttgctcagggcgaacggagtcaactttggtagctgccttcccaaaaagggcgcgtgcccaggctttgagttgcactcgcaccgtagtggcatcaaaaggtgaccgtgcccggtctgggcgttaggatacagcgcctgcataaaagccttgatctgcttaaaagccacctgagcctttgcgccttcagagaagaacatgccgcaagacttgccggaaaactgattggccggacaggccgcgtcgtgcacgcagcaccttgcgtcggtgttggagatctgcaccacatttcggccccaccggttcttcacgatcttggccttgctagactgctccttcagcgcgcgctgcccgttttcgctcgtcacatccatttcaatcacgtgctccttatttatcataatgcttccgtgtagacacttaagctcgccttcgatctcagcgcagcggtgcagccacaacgcgcagcccgtgggctcgtgatgcttgtaggtcacctctgcaaacgactgcaggtacgcctgcaggaatcgccccatcatcgtcacaaaggtcttgttgctggtgaaggtcagctgcaacccgcggtgctcctcgttcagccaggtcttgcatacggccgccagagcttccacttggtcaggcagtagtttgaagttcgcctttagatcgttatccacgtggtacttgtccatcagcgcgcgcgcagcctccatgcccttctcccacgcagacacgatcggcacactcagcgggttcatcaccgtaatttcactttccgcttcgctgggctcttcctcttcctcttgcgtccgcataccacgcgccactgggtcgtcttcattcagccgccgcactgtgcgcttacctcctttgccatgcttgattagcaccggtgggttgctgaaacccaccatttgtagcgccacatcttctctttcttcctcgctgtccacgattacctctggtgatggcgggcgctcgggcttgggagaagggcgcttctttttcttcttgggcgcaatggccaaatccgccgccgaggtcgatggccgcgggctgggtgtgcgcggcaccagcgcgtcttgtgatgagtcttcctcgtcctcggactcgatacgccgcctcatccgcttttttgggggcgcccggggaggcggcggcgacggggacggggacgacacgtcctccatggttgggggacgtcgcgccgcaccgcgtccgcgctcgggggtggtttcgcgctgctcctcttcccgactggccatttccttctcctataggcagaaaaagatcgttgaaactcactccggggctgtggacgtcggcttaccttcgcaaatttgtacctgaggactaccacgcccacgagattaggttctacgaagaccaatcccgcccgcctaatgcggagcttaccgcctgcgtcattacccagggccacattcttggccaattgcaagccatcaacaaagcccgccaagagtttctgctacgaaagggacggggggtttacttggacccccagtccggcgaggagctcaacccaatccccccgccgccgcagccctatcagcagcagccgcgggcccttgcttcccaggtgatgacccaaaaagaagctgcagctgccgccgccacccacggacgaggaggaatactgggacagtcaggcagaggaggttttggacgaggaggaggaggacatgatggaagactgggagagcctagacgaggaagcttccgaggtcgaagaggtgtcagacgaaacaccgtcaccctcggtcgcattcccctcgccggcgccccagaaatcggcaaccggttccagcatggctacaacctccgctcctcaggcgccgccggcactgcccgttcgccgacccaaccgtagatgggacaccactggaaccagggccggtaagtccaagcagccgccgccgttagcccaagagcaacaacagcgccaaggctaccgctcatggcgcgggcacaagaacgccatagttgcttgcttgcaagactgtgggggcaacatctccttcgcccgccgctttcttctctaccatcacggcgtggccttcccccgtaacatcctgcattactaccgtcatctctacagcccatactgcaccggcggcagcggcagcaacagcagcggccacacagaagcaaaggcgaccggatagcaagactctgacaaagcccaagaaatccacagcggcggcagcagcaggaggaggagcgctgcgtctggcgcccaacgaacccgtatcgacccgcgagcttagaaacaggatttttcccactctgtatgctatatttcaacagagcaggggccaagaacaagagctgaaaataaaaaacaggtctctgcgatccctcacccgcagctgcctgtatcacaaaagcgaagatcagcttcggcgcacgctggaagacgcggaggctctcttcagtaaatactgcgcgctgactcttaaggactagtttcgcgccctttctcaaatttaagcgcgaaaactacgtcatctccagcggccacacccggcgccagcacctgttgtcagcgccattttttagggcggagtaacttgtatgtgttgggaattgtagttttcttaaaatgggaagtgacgtaacgtgggaaaacggaagtgacgatttgaggaagttgtgggttttttggctttcgtttctgggcgtaggttcgcgtgcggttttctgggtgttttttgtggactttaaccgttacgtcattttttagtcctatatatactcgctctgcacttggcccttttttacactgtgactgattgagctggtgccgtgtcgagtggtgtttttttaataggttttcttttttactggtaaggctgactgttatgactacgtccggcgttccatttggcatgacactacgaccaacacgatctcggttgtctcggcgcactccgtacagtagggatcgtctacctccttttgagacagaaacccgcgctaccatactggaggatcatccgctgctgcccgaatgtaacactttgacaatgcacaacgtgagttacgtgcgaggtcttccctgcagtgtgggatttacgctgattcaggaatgggttgttccctgggatatggttctaacgcgggaggagcttgtaatcctgaggaagtgtatgcacgtgtgcctgtgttgtgccaacattgatatcatgacgagcatgatgatccatggttacgagtcctgggctctccactgtcattgttccagtcccggttccctgcagtgtatagccggcgggcaggttttggccagctggtttaggatggtggtggatggcgccatgtttaatcagaggtttatatggtaccgggaggtggtgaattacaacatgccaaaagaggtaatgtttatgtccagcgtgtttatgaggggtcgccacttaatctacctgcgcttgtggtatgatggccacgtgggttctgtggtccccgccatgagctttggatacagcgccttgcactgtgggattttgaacaatattgtggtgctgtgctgcagttactgtgctgatttaagtgagatcagggtgcgctgctgtgcccggaggacaaggcgccttatgctgcgggcggtgcgaatcatcgctgaggagaccactgccatgttgtattcctgcaggacggagcggcggcggcagcagtttattcgcgcgctgctgcagcaccaccgccctatcctgatgcacgattatgactctacccccatgtaggcgtggacttctccttcgccgcccgttaagcaaccgcaagttggacagcagcctgtggctcagcagctggacagcgacatgaacttaagtgagctgcccggggagtttattaatatcactgatgagcgtttggctcgacaggaaaccgtgtggaatataacacctaagaatatgtctgttacccatgatatgatgctttttaaggccagccggggagaaaggactgtgtactctgtgtgttgggagggaggtggcaggttgaatactagggttctgtgagtttgattaaggtacggtgatctgtataagctatgtggtggtggggctatactactgaatgaaaaatgacttgaaattttctgcaattgaaaaataaacacgttgaaacataacacaaacgattctttattcttgggcaatgtatgaaaaagtgtaagaggatgtggcaaatatttcattaatgtagttgtggccagaccagtcccatgaaaatgacatagagtatgcacttggagttgtgtctcctgtttcctgtgtaccgtttagtgtaatggttagtgttacaggtttagttttgtctccgtttaagtaaacttgactgacaatgttacttttggcagttttaccgtgagattttggataagctgataggttaggcataaatccaacagcgtttgtataggctgtcgcccctcctgacgcggtaggaggaggggagggtgccctgcatgtctgccgctgctcttgctcttgccgctgctgaggaggggggcgcatctgccgcagcaccggatgcatctgggaaaagcaaaaaaggggctcgtccctgtttccggaggaatttgcaagcggggtcttgcatgacggggaggcaaacccccgttcgccgcagtccggccggtccgagactcgaaccgggggtcccgcgactcaacccttggaaaataaccctccggctacagggagcgagccacttaatgctttcgctttccagcctaaccgcttacgctgcgcgcggccagtggccaaaaaagctagcgcagcagccgccgcgcctggaaggaagccaaaaggagcactcccccgttgtctgacgtcgcacacctgggttcgacacgcgggcggtaaccgcatggatcacggcggacggccggatacggggctcgaaccccggtcgtccgccatgatacccttgcgaatttatccaccagaccacggaagagtgcccgcttacaggctctccttttgcacggtctagagcgtcaacgattgcgcgcgcctgaccggccagagcgtcccgaccatggagcactttttgccgctgcgcaacatctggaaccgcgtccgcgactttccgcgcgcctccaccaccgccgccggcatcacctggatgtccaggtacatctacggatatggcaaacagctattatgggtattatgggtgcggccgcggatcccgggcccgtcgactgcagaggcctgcatgcaagcttggtgtaatcatggtcatagctgtttcctgtgtgaaattgttatccgctcacaattccacacaacatacgagccggaagcataaagtgtaaagcctggggtgcctaatgagtgagctaactcacattaattgcgttgcgctcactgcccgctttccagtcgggaaacctgtcgtgccagctgcattaatgaatcggccaacgcgcggggagaggcggtttgcgtattgggcgctcttccgcttcctcgctcactgactcgctgcgctcggtcgttcggctgcggcgagcggtatcagctcactcaaaggcggtaatacggttatccacagaatcaggggataacgcaggaaagaacatgtgagcaaaaggccagcaaaaggccaggaaccgtaaaaaggccgcgttgctggcgtttttccataggctccgcccccctgacgagcatcacaaaaatcgacgctcaagtcagaggtggcgaaacccgacaggactataaagataccaggcgtttccccctggaagctccctcgtgcgctctcctgttccgaccctgccgcttaccggatacctgtccgcctttctcccttcgggaagcgtggcgctttctcatagctcacgctgtaggtatctcagttcggtgtaggtcgttcgctccaagctgggctgtgtgcacgaaccccccgttcagcccgaccgctgcgccttatccggtaactatcgtcttgagtccaacccggtaagacacgacttatcgccactggcagcagccactggtaacaggattagcagagcgaggtatgtaggcggtgctacagagttcttgaagtggtggcctaactacggctacactagaagaacagtatttggtatctgcgctctgctgaagccagttaccttcggaaaaagagttggtagctcttgatccggcaaacaaaccaccgctggtagcggtggtttttttgtttgcaagcagcagattacgcgcagaaaaaaaggatctcaagaagatcctttgatcttttctacggggtctgacgctcagtggaacgaaaactcacgttaagggattttggtcatgagattatcaaaaaggatcttcacctagatccttttaaattaaaaatgaagttttaaatcaagcccaatctgaataatgttacaaccaattaaccaattctgattagaaaaactcatcgagcatcaaatgaaactgcaatttattcatatcaggattatcaataccatatttttgaaaaagccgtttctgtaatgaaggagaaaactcaccgaggcagttccataggatggcaagatcctggtatcggtctgcgattccgactcgtccaacatcaatacaacctattaatttcccctcgtcaaaaataaggttatcaagtgagaaatcaccatgagtgacgactgaatccggtgagaatggcaaaagtttatgcatttctttccagacttgttcaacaggccagccattacgctcgtcatcaaaatcactcgcatcaaccaaaccgttattcattcgtgattgcgcctgagcgagacgaaatacgcgatcgctgttaaaaggacaattacaaacaggaatcgaatgcaaccggcgcaggaacactgccagcgcatcaacaatattttcacctgaatcaggatattcttctaatacctggaatgctgtttttccggggatcgcagtggtgagtaaccatgcatcatcaggagtacggataaaatgcttgatggtcggaagaggcataaattccgtcagccagtttagtctgaccatctcatctgtaacatcattggcaacgctacctttgccatgtttcagaaacaactctggcgcatcgggcttcccatacaagcgatagattgtcgcacctgattgcccgacattatcgcgagcccatttatacccatataaatcagcatccatgttggaatttaatcgcggcctcgacgtttcccgttgaatatggctcataacaccccttgtattactgtttatgtaagcagacagttttattgttcatgatgatatatttttatcttgtgcaatgtaacatcagagattttgagacacgggccagagctgca

SEQ ID NO: 41 - DNA, 10034 bp, synthetic construct
  source 1..10034: mol_type = other DNA
tcgcgcgtttcggtgatgacggtgaaaacctctgacacatgcagctcccggagacggtcacagcttgtctgtaagcggatgccgggagcagacaagcccgtcagggcgcgtcagcgggtgttggcgggtgtcggggctggcttaactatgcggcatcagagcagattgtactgagagtgcaccatatgcggtgtgaaataccgcacagatgcgtaaggagaaaataccgcatcaggcgccattcgccattcaggctgcgcaactgttgggaagggcgatcggtgcgggcctcttcgctattacgccagctggcgaaagggggatgtgctgcaaggcgattaagttgggtaacgccagggttttcccagtcacgacgttgtaaaacgacggccagagaattctcgcgatagggataacagggtaataaataatgtactagagacactttcaataaaggcaaatgcttttatttgtacactctcgggtgattatttacccccacccttgccgtctgcgccgtttaaaaatcaaaggggttctgccgcgcatcgctatgcgccactggcagggacacgttgcgatactggtgtttagtgctccacttaaactcaggcacaaccatccgcggcagctcggtgaagttttcactccacaggctgcgcaccatcaccaacgcgtttagcaggtcgggcgccgatatcttgaagtcgcagttggggcctccgccctgcgcgcgcgagttgcgatacacagggttgcagcactggaacactatcagcgccgggtggtgcacgctggccagcacgctcttgtcggagatcagatccgcgtccaggtcctccgcgttgctcagggcgaacggagtcaactttggtagctgccttcccaaaaagggcgcgtgcccaggctttgagttgcactcgcaccgtagtggcatcaaaaggtgaccgtgcccggtctgggcgttaggatacagcgcctgcataaaagccttgatctgcttaaaagccacctgagcctttgcgccttcagagaagaacatgccgcaagacttgccggaaaactgattggccggacaggccgcgtcgtgcacgcagcaccttgcgtcggtgttggagatctgcaccacatttcggccccaccggttcttcacgatcttggccttgctagactgctccttcagcgcgcgctgcccgttttcgctcgtcacatccatttcaatcacgtgctccttatttatcataatgcttccgtgtagacacttaagctcgccttcgatctcagcgcagcggtgcagccacaacgcgcagcccgtgggctcgtgatgcttgtaggtcacctctgcaaacgactgcaggtacgcctgcaggaatcgccccatcatcgtcacaaaggtcttgttgctggtgaaggtcagctgcaacccgcggtgctcctcgttcagccaggtcttgcatacggccgccagagcttccacttggtcaggcagtagtttgaagttcgcctttagatcgttatccacgtggtacttgtccatcagcgcgcgcgcagcctccatgcccttctcccacgcagacacgatcggcacactcagcgggttcatcaccgtaatttcactttccgcttcgctgggctcttcctcttcctcttgcgtccgcataccacgcgccactgggtcgtcttcattcagccgccgcactgtgcgcttacctcctttgccatgcttgattagcaccggtgggttgctgaaacccaccatttgtagcgccacatcttctctttcttcctcgctgtccacgattacctctggtgatggcgggcgctcgggcttgggagaagggcgcttctttttcttcttgggcgcaatggccaaatccgccgccgaggtcgatggccgcgggctgggtgtgcgcggcaccagcgcgtcttgtgatgagtcttcctcgtcctcggactcgatacgccgcctcatccgcttttttgggggcgcccggggaggcggcggcgacggggacggggacgacacgtcctccatggttgggggacgtcgcgccgcaccgcgtccgcgctcgggggtggtttcgcgctgctcctcttcccgactggccatttccttctcctataggcagaaaaagatcatggagtcagtcgagaagaaggacagcctaaccgccccctctgagttcgccaccaccgcctccaccgatgccgccaacgcgcctaccaccttccccgtcgaggcacccccgcttgaggaggaggaagtgattatcgagcaggacccaggttttgtaagcgaagacgacgaggaccgctcagtaccaacagaggataaaaagcaagaccaggacaacgcagaggcaaacgaggaacaagtcgggcggggggacgaaaggcatggcgactacctagatgtgggagacgacgtgctgttgaagcatctgcagcgccagtgcgccattatctgcgacgcgttgcaagagcgcagcgatgtgcccctcgccatagcggatgtcagccttgcctacgaacgccacctattctcaccgcgcgtaccccccaaacgccaagaaaacggcacatgcgagcccaacccgcgcctcaacttctaccccgtatttgccgtgccagaggtgcttgccacctatcacatctttttccaaaactgcaagatacccctatcctgccgtgccaaccgcagccgagcggacaagcagctggccttgcggcagggcgctgtcatacctgatatcgcctcgctcaacgaagtgccaaaaatctttgagggtcttggacgcgacgagaagcgcgcggcaaacgctctgcaacaggaaaacagcgaaaatgaaagtcactctggagtgttggtggaactcgagggtgacaacgcgcgcctagccgtactaaaacgcagcatcgaggtcacccactttgcctacccggcacttaacctaccccccaaggtcatgagcacagtcatgagtgagctgatcgtgcgccgtgcgcagcccctggagagggatgcaaatttgcaagaacaaacagaggagggcctacccgcagttggcgacgagcagctagcgcgctggcttcaaacgcgcgagcctgccgacttggaggagcgacgcaaactaatgatggccgcagtgctcgttaccgtggagcttgagtgcatgcagcggttctttgctgacccggagatgcagcgcaagctagaggaaacattgcactacacctttcgacagggctacgtacgccaggcctgcaagatctccaacgtggagctctgcaacctggtctcctaccttggaattttgcacgaaaaccgccttgggcaaaacgtgcttcattccacgctcaagggcgaggcgcgccgcgactacgtccgcgactgcgtttacttatttctatgctacacctggcagacggccatgggcgtttggcagcagtgcttggaggagtgcaacctcaaggagctgcagaaactgctaaagcaaaacttgaaggacctatggacggccttcaacgagcgctccgtggccgcgcacctggcggacatcattttccccgaacgcctgcttaaaaccctgcaacagggtctgccagacttcaccagtcaaagcatgttgcagaactttaggaactttatcctagagcgctcaggaatcttgcccgccacctgctgtgcacttcctagcgactttgtgcccattaagtaccgcgaatgccctccgccgctttggggccactgctaccttctgcagctagccaactaccttgcctaccactctgacataatggaagacgtgagcggtgacggtctactggagtgtcactgtcgctgcaacctatgcaccccgcaccgctccctggtttgcaattcgcagctgcttaacgaaagtcaaattatcggtacctttgagctgcagggtccctcgcctgacgaaaagtccgcggctccggggttgaaactcactccggggctgtggacgtcggcttaccttcgcaaatttgtacctgaggactaccacgcccacgagattaggttctacgaagaccaatcccgcccgcctaatgcggagcttaccgcctgcgtcattacccagggccacattcttggccaattgcaagccatcaacaaagcccgccaagagtttctgctacgaaagggacggggggtttacttggacccccagtccggcgaggagctcaacccaatccccccgccgccgcagccctatcagcagcagccgcgggcccttgcttcccaggtgatgacccaaaaagaagctgcagctgccgccgccacccacggacgaggaggaatactgggacagtcaggcagaggaggttttggacgaggaggaggaggacatgatggaagactgggagagcctagacgaggaagcttccgaggtcgaagaggtgtcagacgaaacaccgtcaccctcggtcgcattcccctcgccggcgccccagaaatcggcaaccggttccagcatggctacaacctccgctcctcaggcgccgccggcactgcccgttcgccgacccaaccgtagatgggacaccactggaaccagggccggtaagtccaagcagccgccgccgttagcccaagagcaacaacagcgccaaggctaccgctcatggcgcgggcacaagaacgccatagttgcttgcttgcaagactgtgggggcaacatctccttcgcccgccgctttcttctctaccatcacggcgtggccttcccccgtaacatcctgcattactaccgtcatctctacagcccatactgcaccggcggcagcggcagcaacagcagcggccacacagaagcaaaggcgaccggatagcaagactctgacaaagcccaagaaatccacagcggcggcagcagcaggaggaggagcgctgcgtctggcgcccaacgaacccgtatcgacccgcgagcttagaaacaggatttttcccactctgtatgctatatttcaacagagcaggggccaagaacaagagctgaaaataaaaaacaggtctctgcgatccctcacccgcagctgcctgtatcacaaaagcgaagatcagcttcggcgcacgctggaagacgcggaggctctcttcagtaaatactgcgcgctgactcttaaggactagtttcgcgccctttctcaaatttaagcgcgaaaactacgtcatctccagcggccacacccggcgccagcacctgttgtcagcgccattttttagggcggagtaacttgtatgtgttgggaattgtagttttcttaaaatgggaagtgacgtaacgtgggaaaacggaagtgacgatttgaggaagttgtgggttttttggctttcgtttctgggcgtaggttcgcgtgcggttttctgggtgttttttgtggactttaaccgttacgtcattttttagtcctatatatactcgctctgcacttggcccttttttacactgtgactgattgagctggtgccgtgtcgagtggtgtttttttaataggttttcttttttactggtaaggctgactgttatgactacgtccggcgttccatttggcatgacactacgaccaacacgatctcggttgtctcggcgcactccgtacagtagggatcgtctacctccttttgagacagaaacccgcgctaccatactggaggatcatccgctgctgcccgaatgtaacactttgacaatgcacaacgtgagttacgtgcgaggtcttccctgcagtgtgggatttacgctgattcaggaatgggttgttccctgggatatggttctaacgcgggaggagcttgtaatcctgaggaagtgtatgcacgtgtgcctgtgttgtgccaacattgatatcatgacgagcatgatgatccatggttacgagtcctgggctctccactgtcattgttccagtcccggttccctgcagtgtatagccggcgggcaggttttggccagctggtttaggatggtggtggatggcgccatgtttaatcagaggtttatatggtaccgggaggtggtgaattacaacatgccaaaagaggtaatgtttatgtccagcgtgtttatgaggggtcgccacttaatctacctgcgcttgtggtatgatggccacgtgggttctgtggtccccgccatgagctttggatacagcgccttgcactgtgggattttgaacaatattgtggtgctgtgctgcagttactgtgctgatttaagtgagatcagggtgcgctgctgtgcccggaggacaaggcgccttatgctgcgggcggtgcgaatcatcgctgaggagaccactgccatgttgtattcctgcaggacggagcggcggcggcagcagtttattcgcgcgctgctgcagcaccaccgccctatcctgatgcacgattatgactctacccccatgtaggcgtggacttctccttcgccgcccgttaagcaaccgcaagttggacagcagcctgtggctcagcagctggacagcgacatgaacttaagtgagctgcccggggagtttattaatatcactgatgagcgtttggctcgacaggaaaccgtgtggaatataacacctaagaatatgtctgttacccatgatatgatgctttttaaggccagccggggagaaaggactgtgtactctgtgtgttgggagggaggtggcaggttgaatactagggttctgtgagtttgattaaggtacggtgatctgtataagctatgtggtggtggggctatactactgaatgaaaaatgacttgaaattttctgcaattgaaaaataaacacgttgaaacataacacaaacgattctttattcttgggcaatgtatgaaaaagtgtaagaggatgtggcaaatatttcattaatgtagttgtggccagaccagtcccatgaaaatgacatagagtatgcacttggagttgtgtctcctgtttcctgtgtaccgtttagtgtaatggttagtgttacaggtttagttttgtctccgtttaagtaaacttgactgacaatgttacttttggcagttttaccgtgagattttggataagctgataggttaggcataaatccaacagcgtttgtataggctgtcgcccctcctgacgcggtaggaggaggggagggtgccctgcatgtctgccgctgctcttgctcttgccgctgctgaggaggggggcgcatctgccgcagcaccggatgcatctgggaaaagcaaaaaaggggctcgtccctgtttccggaggaatttgcaagcggggtcttgcatgacggggaggcaaacccccgttcgccgcagtccggccggtccgagactcgaaccgggggtcccgcgactcaacccttggaaaataaccctccggctacagggagcgagccacttaatgctttcgctttccagcctaaccgcttacgctgcgcgcggccagtggccaaaaaagctagcgcagcagccgccgcgcctggaaggaagccaaaaggagcactcccccgttgtctgacgtcgcacacctgggttcgacacgcgggcggtaaccgcatggatcacggcggacggccggatacggggctcgaaccccggtcgtccgccatgatacccttgcgaatttatccaccagaccacggaagagtgcccgcttacaggctctccttttgcacggtctagagcgtcaacgattgcgcgcgcctgaccggccagagcgtcccgaccatggagcactttttgccgctgcgcaacatctggaaccgcgtccgcgactttccgcgcgcctccaccaccgccgccggcatcacctggatgtccaggtacatctacggatatggcaaacagctattatgggtattatgggtgcggccgcggatcccgggcccgtcgactgcagaggcctgcatgcaagcttggtgtaatcatggtcatagctgtttcctgtgtgaaattgttatccgctcacaattccacacaacatacgagccggaagcataaagtgtaaagcctggggtgcctaatgagtgagctaactcacattaattgcgttgcgctcactgcccgctttccagtcgggaaacctgtcgtgccagctgcattaatgaatcggccaacgcgcggggagaggcggtttgcgtattgggcgctcttccgcttcctcgctcactgactcgctgcgctcggtcgttcggctgcggcgagcggtatcagctcactcaaaggcggtaatacggttatccacagaatcaggggataacgcaggaaagaacatgtgagcaaaaggccagcaaaaggccaggaaccgtaaaaaggccgcgttgctggcgtttttccataggctccgcccccctgacgagcatcacaaaaatcgacgctcaagtcagaggtggcgaaacccgacaggactataaagataccaggcgtttccccctggaagctccctcgtgcgctctcctgttccgaccctgccgcttaccggatacctgtccgcctttctcccttcgggaagcgtggcgctttctcatagctcacgctgtaggtatctcagttcggtgtaggtcgttcgctccaagctgggctgtgtgcacgaaccccccgttcagcccgaccgctgcgccttatccggtaactatcgtcttgagtccaacccggtaagacacgacttatcgccactggcagcagccactggtaacaggattagcagagcgaggtatgtaggcggtgctacagagttcttgaagtggtggcctaactacggctacactagaagaacagtatttggtatctgcgctctgctgaagccagttaccttcggaaaaagagttggtagctcttgatccggcaaacaaaccaccgctggtagcggtggtttttttgtttgcaagcagcagattacgcgcagaaaaaaaggatctcaagaagatcctttgatcttttctacggggtctgacgctcagtggaacgaaaactcacgttaagggattttggtcatgagattatcaaaaaggatcttcacctagatccttttaaattaaaaatgaagttttaaatcaagcccaatctgaataatgttacaaccaattaaccaattctgattagaaaaactcatcgagcatcaaatgaaactgcaatttattcatatcaggattatcaataccatatttttgaaaaagccgtttctgtaatgaaggagaaaactcaccgaggcagttccataggatggcaagatcctggtatcggtctgcgattccgactcgtccaacatcaatacaacctattaatttcccctcgtcaaaaataaggttatcaagtgagaaatcaccatgagtgacgactgaatccggtgagaatggcaaaagtttatgcatttctttccagacttgttcaacaggccagccattacgctcgtcatcaaaatcactcgcatcaaccaaaccgttattcattcgtgattgcgcctgagcgagacgaaatacgcgatcgctgttaaaaggacaattacaaacaggaatcgaatgcaaccggcgcaggaacactgccagcgcatcaacaatattttcacctgaatcaggatattcttctaatacctggaatgctgtttttccggggatcgcagtggtgagtaaccatgcatcatcaggagtacggataaaatgcttgatggtcggaagaggcataaattccgtcagccagtttagtctgaccatctcatctgtaacatcattggcaacgctacctttgccatgtttcagaaacaactctggcgcatcgggcttcccatacaagcgatagattgtcgcacctgattgcccgacattatcgcgagcccatttatacccatataaatcagcatccatgttggaatttaatcgcggcctcgacgtttcccgttgaatatggctcataacaccccttgtattactgtttatgtaagcagacagttttattgttcatgatgatatatttttatcttgtgcaatgtaacatcagagattttgagacacgggccagagctgca

SEQ ID NO: 42 - DNA, 10034 bp, synthetic construct
  source 1..10034: mol_type = other DNA
tcgcgcgtttcggtgatgacggtgaaaacctctgacacatgcagctcccggagacggtcacagcttgtctgtaagcggatgccgggagcagacaagcccgtcagggcgcgtcagcgggtgttggcgggtgtcggggctggcttaactatgcggcatcagagcagattgtactgagagtgcaccatatgcggtgtgaaataccgcacagatgcgtaaggagaaaataccgcatcaggcgccattcgccattcaggctgcgcaactgttgggaagggcgatcggtgcgggcctcttcgctattacgccagctggcgaaagggggatgtgctgcaaggcgattaagttgggtaacgccagggttttcccagtcacgacgttgtaaaacgacggccagagaattctcgcgatagggataacagggtaataaataatgtactagagacactttcaataaaggcaaatgcttttatttgtacactctcgggtgattatttacccccacccttgccgtctgcgccgtttaaaaatcaaaggggttctgccgcgcatcgctatgcgccactggcagggacacgttgcgatactggtgtttagtgctccacttaaactcaggcacaaccatccgcggcagctcggtgaagttttcactccacaggctgcgcaccatcaccaacgcgtttagcaggtcgggcgccgatatcttgaagtcgcagttggggcctccgccctgcgcgcgcgagttgcgatacacagggttgcagcactggaacactatcagcgccgggtggtgcacgctggccagcacgctcttgtcggagatcagatccgcgtccaggtcctccgcgttgctcagggcgaacggagtcaactttggtagctgccttcccaaaaagggcgcgtgcccaggctttgagttgcactcgcaccgtagtggcatcaaaaggtgaccgtgcccggtctgggcgttaggatacagcgcctgcataaaagccttgatctgcttaaaagccacctgagcctttgcgccttcagagaagaacatgccgcaagacttgccggaaaactgattggccggacaggccgcgtcgtgcacgcagcaccttgcgtcggtgttggagatctgcaccacatttcggccccaccggttcttcacgatcttggccttgctagactgctccttcagcgcgcgctgcccgttttcgctcgtcacatccatttcaatcacgtgctccttatttatcataatgcttccgtgtagacacttaagctcgccttcgatctcagcgcagcggtgcagccacaacgcgcagcccgtgggctcgtgatgcttgtaggtcacctctgcaaacgactgcaggtacgcctgcaggaatcgccccatcatcgtcacaaaggtcttgttgctggtgaaggtcagctgcaacccgcggtgctcctcgttcagccaggtcttgcatacggccgccagagcttccacttggtcaggcagtagtttgaagttcgcctttagatcgttatccacgtggtacttgtccatcagcgcgcgcgcagcctccatgcccttctcccacgcagacacgatcggcacactcagcgggttcatcaccgtaatttcactttccgcttcgctgggctcttcctcttcctcttgcgtccgcataccacgcgccactgggtcgtcttcattcagccgccgcactgtgcgcttacctcctttgccatgcttgattagcaccggtgggttgctgaaacccaccatttgtagcgccacatcttctctttcttcctcgctgtccacgattacctctggtgatggcgggcgctcgggcttgggagaagggcgcttctttttcttcttgggcgcaatggccaaatccgccgccgaggtcgatggccgcgggctgggtgtgcgcggcaccagcgcgtcttgtgatgagtcttcctcgtcctcggactcgatacgccgcctcatccgcttttttgggggcgcccggggaggcggcggcgacggggacggggacgacacgtcctccatggttgggggacgtcgcgccgcaccgcgtccgcgctcgggggtggtttcgcgctgctcctcttcccgactggccatttccttctcctataggcagaaaaagatctgatgatcagtcgagaagaaggacagcctaaccgccccctctgagttcgccaccaccgcctccaccgatgccgccaacgcgcctaccaccttccccgtcgaggcacccccgcttgaggaggaggaagtgattatcgagcaggacccaggttttgtaagcgaagacgacgaggaccgctcagtaccaacagaggataaaaagcaagaccaggacaacgcagaggcaaacgaggaacaagtcgggcggggggacgaaaggcatggcgactacctagatgtgggagacgacgtgctgttgaagcatctgcagcgccagtgcgccattatctgcgacgcgttgcaagagcgcagcgatgtgcccctcgccatagcggatgtcagccttgcctacgaacgccacctattctcaccgcgcgtaccccccaaacgccaagaaaacggcacatgcgagcccaacccgcgcctcaacttctaccccgtatttgccgtgccagaggtgcttgccacctatcacatctttttccaaaactgcaagatacccctatcctgccgtgccaaccgcagccgagcggacaagcagctggccttgcggcagggcgctgtcatacctgatatcgcctcgctcaacgaagtgccaaaaatctttgagggtcttggacgcgacgagaagcgcgcggcaaacgctctgcaacaggaaaacagcgaaaatgaaagtcactctggagtgttggtggaactcgagggtgacaacgcgcgcctagccgtactaaaacgcagcatcgaggtcacccactttgcctacccggcacttaacctaccccccaaggtcatgagcacagtcatgagtgagctgatcgtgcgccgtgcgcagcccctggagagggatgcaaatttgcaagaacaaacagaggagggcctacccgcagttggcgacgagcagctagcgcgctggcttcaaacgcgcgagcctgccgacttggaggagcgacgcaaactaatgatggccgcagtgctcgttaccgtggagcttgagtgcatgcagcggttctttgctgacccggagatgcagcgcaagctagaggaaacattgcactacacctttcgacagggctacgtacgccaggcctgcaagatctccaacgtggagctctgcaacctggtctcctaccttggaattttgcacgaaaaccgccttgggcaaaacgtgcttcattccacgctcaagggcgaggcgcgccgcgactacgtccgcgactgcgtttacttatttctatgctacacctggcagacggccatgggcgtttggcagcagtgcttggaggagtgcaacctcaaggagctgcagaaactgctaaagcaaaacttgaaggacctatggacggccttcaacgagcgctccgtggccgcgcacctggcggacatcattttccccgaacgcctgcttaaaaccctgcaacagggtctgccagacttcaccagtcaaagcatgttgcagaactttaggaactttatcctagagcgctcaggaatcttgcccgccacctgctgtgcacttcctagcgactttgtgcccattaagtaccgcgaatgccctccgccgctttggggccactgctaccttctgcagctagccaactaccttgcctaccactctgacataatggaagacgtgagcggtgacggtctactggagtgtcactgtcgctgcaacctatgcaccccgcaccgctccctggtttgcaattcgcagctgcttaacgaaagtcaaattatcggtacctttgagctgcagggtccctcgcctgacgaaaagtccgcggctccggggttgaaactcactccggggctgtggacgtcggcttaccttcgcaaatttgtacctgaggactaccacgcccacgagattaggttctacgaagaccaatcccgcccgcctaatgcggagcttaccgcctgcgtcattacccagggccacattcttggccaattgcaagccatcaacaaagcccgccaagagtttctgctacgaaagggacggggggtttacttggacccccagtccggcgaggagctcaacccaatccccccgccgccgcagccctatcagcagcagccgcgggcccttgcttcccaggatggcacccaaaaagaagctgcagctgccgccgccacccacggacgaggaggaatactgggacagtcaggcagaggaggttttggacgaggaggaggaggacatgatggaagactgggagagcctagacgaggaagcttccgaggtcgaagaggtgtcagacgaaacaccgtcaccctcggtcgcattcccctcgccggcgccccagaaatcggcaaccggttccagcatggctacaacctccgctcctcaggcgccgccggcactgcccgttcgccgacccaaccgtagatgggacaccactggaaccagggccggtaagtccaagcagccgccgccgttagcccaagagcaacaacagcgccaaggctaccgctcatggcgcgggcacaagaacgccatagttgcttgcttgcaagactgtgggggcaacatctccttcgcccgccgctttcttctctaccatcacggcgtggccttcccccgtaacatcctgcattactaccgtcatctctacagcccatactgcaccggcggcagcggcagcaacagcagcggccacacagaagcaaaggcgaccggatagcaagactctgacaaagcccaagaaatccacagcggcggcagcagcaggaggaggagcgctgcgtctggcgcccaacgaacccgtatcgacccgcgagcttagaaacaggatttttcccactctgtatgctatatttcaacagagcaggggccaagaacaagagctgaaaataaaaaacaggtctctgcgatccctcacccgcagctgcctgtatcacaaaagcgaagatcagcttcggcgcacgctggaagacgcggaggctctcttcagtaaatactgcgcgctgactcttaaggactagtttcgcgccctttctcaaatttaagcgcgaaaactacgtcatctccagcggccacacccggcgccagcacctgttgtcagcgccattttttagggcggagtaacttgtatgtgttgggaattgtagttttcttaaaatgggaagtgacgtaacgtgggaaaacggaagtgacgatttgaggaagttgtgggttttttggctttcgtttctgggcgtaggttcgcgtgcggttttctgggtgttttttgtggactttaaccgttacgtcattttttagtcctatatatactcgctctgcacttggcccttttttacactgtgactgattgagctggtgccgtgtcgagtggtgtttttttaataggttttcttttttactggtaaggctgactgttatgactacgtccggcgttccatttggcatgacactacgaccaacacgatctcggttgtctcggcgcactccgtacagtagggatcgtctacctccttttgagacagaaacccgcgctaccatactggaggatcatccgctgctgcccgaatgtaacactttgacaatgcacaacgtgagttacgtgcgaggtcttccctgcagtgtgggatttacgctgattcaggaatgggttgttccctgggatatggttctaacgcgggaggagcttgtaatcctgaggaagtgtatgcacgtgtgcctgtgttgtgccaacattgatatcatgacgagcatgatgatccatggttacgagtcctgggctctccactgtcattgttccagtcccggttccctgcagtgtatagccggcgggcaggttttggccagctggtttaggatggtggtggatggcgccatgtttaatcagaggtttatatggtaccgggaggtggtgaattacaacatgccaaaagaggtaatgtttatgtccagcgtgtttatgaggggtcgccacttaatctacctgcgcttgtggtatgatggccacgtgggttctgtggtccccgccatgagctttggatacagcgccttgcactgtgggattttgaacaatattgtggtgctgtgctgcagttactgtgctgatttaagtgagatcagggtgcgctgctgtgcccggaggacaaggcgccttatgctgcgggcggtgcgaatcatcgctgaggagaccactgccatgttgtattcctgcaggacggagcggcggcggcagcagtttattcgcgcgctgctgcagcaccaccgccctatcctgatgcacgattatgactctacccccatgtaggcgtggacttctccttcgccgcccgttaagcaaccgcaagttggacagcagcctgtggctcagcagctggacagcgacatgaacttaagtgagctgcccggggagtttattaatatcactgatgagcgtttggctcgacaggaaaccgtgtggaatataacacctaagaatatgtctgttacccatgatatgatgctttttaaggccagccggggagaaaggactgtgtactctgtgtgttgggagggaggtggcaggttgaatactagggttctgtgagtttgattaaggtacggtgatctgtataagctatgtggtggtggggctatactactgaatgaaaaatgacttgaaattttctgcaattgaaaaataaacacgttgaaacataacacaaacgattctttattcttgggcaatgtatgaaaaagtgtaagaggatgtggcaaatatttcattaatgtagttgtggccagaccagtcccatgaaaatgacatagagtatgcacttggagttgtgtctcctgtttcctgtgtaccgtttagtgtaatggttagtgttacaggtttagttttgtctccgtttaagtaaacttgactgacaatgttacttttggcagttttaccgtgagattttggataagctgataggttaggcataaatccaacagcgtttgtataggctgtcgcccctcctgacgcggtaggaggaggggagggtgccctgcatgtctgccgctgctcttgctcttgccgctgctgaggaggggggcgcatctgccgcagcaccggatgcatctgggaaaagcaaaaaaggggctcgtccctgtttccggaggaatttgcaagcggggtcttgcatgacggggaggcaaacccccgttcgccgcagtccggccggtccgagactcgaaccgggggtcccgcgactcaacccttggaaaataaccctccggctacagggagcgagccacttaatgctttcgctttccagcctaaccgcttacgctgcgcgcggccagtggccaaaaaagctagcgcagcagccgccgcgcctggaaggaagccaaaaggagcactcccccgttgtctgacgtcgcacacctgggttcgacacgcgggcggtaaccgcatggatcacggcggacggccggatacggggctcgaaccccggtcgtccgccatgatacccttgcgaatttatccaccagaccacggaagagtgcccgcttacaggctctccttttgcacggtctagagcgtcaacgattgcgcgcgcctgaccggccagagcgtcccgaccatggagcactttttgccgctgcgcaacatctggaaccgcgtccgcgactttccgcgcgcctccaccaccgccgccggcatcacctggatgtccaggtacatctacggatatggcaaacagctattatgggtattatgggtgcggccgcggatcccgggcccgtcgactgcagaggcctgcatgcaagcttggtgtaatcatggtcatagctgtttcctgtgtgaaattgttatccgctcacaattccacacaacatacgagccggaagcataaagtgtaaagcctggggtgcctaatgagtgagctaactcacattaattgcgttgcgctcactgcccgctttccagtcgggaaacctgtcgtgccagctgcattaatgaatcggccaacgcgcggggagaggcggtttgcgtattgggcgctcttccgcttcctcgctcactgactcgctgcgctcggtcgttcggctgcggcgagcggtatcagctcactcaaaggcggtaatacggttatccacagaatcaggggataacgcaggaaagaacatgtgagcaaaaggccagcaaaaggccaggaaccgtaaaaaggccgcgttgctggcgtttttccataggctccgcccccctgacgagcatcacaaaaatcgacgctcaagtcagaggtggcgaaacccgacaggactataaagataccaggcgtttccccctggaagctccctcgtgcgctctcctgttccgaccctgccgcttaccggatacctgtccgcctttctcccttcgggaagcgtggcgctttctcatagctcacgctgtaggtatctcagttcggtgtaggtcgttcgctccaagctgggctgtgtgcacgaaccccccgttcagcccgaccgctgcgccttatccggtaactatcgtcttgagtccaacccggtaagacacgacttatcgccactggcagcagccactggtaacaggattagcagagcgaggtatgtaggcggtgctacagagttcttgaagtggtggcctaactacggctacactagaagaacagtatttggtatctgcgctctgctgaagccagttaccttcggaaaaagagttggtagctcttgatccggcaaacaaaccaccgctggtagcggtggtttttttgtttgcaagcagcagattacgcgcagaaaaaaaggatctcaagaagatcctttgatcttttctacggggtctgacgctcagtggaacgaaaactcacgttaagggattttggtcatgagattatcaaaaaggatcttcacctagatccttttaaattaaaaatgaagttttaaatcaagcccaatctgaataatgttacaaccaattaaccaattctgattagaaaaactcatcgagcatcaaatgaaactgcaatttattcatatcaggattatcaataccatatttttgaaaaagccgtttctgtaatgaaggagaaaactcaccgaggcagttccataggatggcaagatcctggtatcggtctgcgattccgactcgtccaacatcaatacaacctattaatttcccctcgtcaaaaataaggttatcaagtgagaaatcaccatgagtgacgactgaatccggtgagaatggcaaaagtttatgcatttctttccagacttgttcaacaggccagccattacgctcgtcatcaaaatcactcgcatcaaccaaaccgttattcattcgtgattgcgcctgagcgagacgaaatacgcgatcgctgttaaaaggacaattacaaacaggaatcgaatgcaaccggcgcaggaacactgccagcgcatcaacaatattttcacctgaatcaggatattcttctaatacctggaatgctgtttttccggggatcgcagtggtgagtaaccatgcatcatcaggagtacggataaaatgcttgatggtcggaagaggcataaattccgtcagccagtttagtctgaccatctcatctgtaacatcattggcaacgctacctttgccatgtttcagaaacaactctggcgcatcgggcttcccatacaagcgatagattgtcgcacctgattgcccgacattatcgcgagcccatttatacccatataaatcagcatccatgttggaatttaatcgcggcctcgacgtttcccgttgaatatggctcataacaccccttgtattactgtttatgtaagcagacagttttattgttcatgatgatatatttttatcttgtgcaatgtaacatcagagattttgagacacgggccagagctgca

SEQ ID NO: 43 - DNA, 10040 bp, synthetic construct
  source 1..10040: mol_type = other DNA
tcgcgcgtttcggtgatgacggtgaaaacctctgacacatgcagctcccggagacggtcacagcttgtctgtaagcggatgccgggagcagacaagcccgtcagggcgcgtcagcgggtgttggcgggtgtcggggctggcttaactatgcggcatcagagcagattgtactgagagtgcaccatatgcggtgtgaaataccgcacagatgcgtaaggagaaaataccgcatcaggcgccattcgccattcaggctgcgcaactgttgggaagggcgatcggtgcgggcctcttcgctattacgccagctggcgaaagggggatgtgctgcaaggcgattaagttgggtaacgccagggttttcccagtcacgacgttgtaaaacgacggccagagaattctcgcgatagggataacagggtaataaataatgtactagagacactttcaataaaggcaaatgcttttatttgtacactctcgggtgattatttacccccacccttgccgtctgcgccgtttaaaaatcaaaggggttctgccgcgcatcgctatgcgccactggcagggacacgttgcgatactggtgtttagtgctccacttaaactcaggcacaaccatccgcggcagctcggtgaagttttcactccacaggctgcgcaccatcaccaacgcgtttagcaggtcgggcgccgatatcttgaagtcgcagttggggcctccgccctgcgcgcgcgagttgcgatacacagggttgcagcactggaacactatcagcgccgggtggtgcacgctggccagcacgctcttgtcggagatcagatccgcgtccaggtcctccgcgttgctcagggcgaacggagtcaactttggtagctgccttcccaaaaagggcgcgtgcccaggctttgagttgcactcgcaccgtagtggcatcaaaaggtgaccgtgcccggtctgggcgttaggatacagcgcctgcataaaagccttgatctgcttaaaagccacctgagcctttgcgccttcagagaagaacatgccgcaagacttgccggaaaactgattggccggacaggccgcgtcgtgcacgcagcaccttgcgtcggtgttggagatctgcaccacatttcggccccaccggttcttcacgatcttggccttgctagactgctccttcagcgcgcgctgcccgttttcgctcgtcacatccatttcaatcacgtgctccttatttatcataatgcttccgtgtagacacttaagctcgccttcgatctcagcgcagcggtgcagccacaacgcgcagcccgtgggctcgtgatgcttgtaggtcacctctgcaaacgactgcaggtacgcctgcaggaatcgccccatcatcgtcacaaaggtcttgttgctggtgaaggtcagctgcaacccgcggtgctcctcgttcagccaggtcttgcatacggccgccagagcttccacttggtcaggcagtagtttgaagttcgcctttagatcgttatccacgtggtacttgtccatcagcgcgcgcgcagcctccatgcccttctcccacgcagacacgatcggcacactcagcgggttcatcaccgtaatttcactttccgcttcgctgggctcttcctcttcctcttgcgtccgcataccacgcgccactgggtcgtcttcattcagccgccgcactgtgcgcttacctcctttgccatgcttgattagcaccggtgggttgctgaaacccaccatttgtagcgccacatcttctctttcttcctcgctgtccacgattacctctggtgatggcgggcgctcgggcttgggagaagggcgcttctttttcttcttgggcgcaatggccaaatccgccgccgaggtcgatggccgcgggctgggtgtgcgcggcaccagcgcgtcttgtgatgagtcttcctcgtcctcggactcgatacgccgcctcatccgcttttttgggggcgcccggggaggcggcggcgacggggacggggacgacacgtcctccatggttgggggacgtcgcgccgcaccgcgtccgcgctcgggggtggtttcgcgctgctcctcttcccgactggccatttccttctcctataggcagaaaaagatctgatgagagtcagtcgagaagaaggacagcctaaccgccccctctgagttcgccaccaccgcctccaccgatgccgccaacgcgcctaccaccttccccgtcgaggcacccccgcttgaggaggaggaagtgattatcgagcaggacccaggttttgtaagcgaagacgacgaggaccgctcagtaccaacagaggataaaaagcaagaccaggacaacgcagaggcaaacgaggaacaagtcgggcggggggacgaaaggcatggcgactacctagatgtgggagacgacgtgctgttgaagcatctgcagcgccagtgcgccattatctgcgacgcgttgcaagagcgcagcgatgtgcccctcgccatagcggatgtcagccttgcctacgaacgccacctattctcaccgcgcgtaccccccaaacgccaagaaaacggcacatgcgagcccaacccgcgcctcaacttctaccccgtatttgccgtgccagaggtgcttgccacctatcacatctttttccaaaactgcaagatacccctatcctgccgtgccaaccgcagccgagcggacaagcagctggccttgcggcagggcgctgtcatacctgatatcgcctcgctcaacgaagtgccaaaaatctttgagggtcttggacgcgacgagaagcgcgcggcaaacgctctgcaacaggaaaacagcgaaaatgaaagtcactctggagtgttggtggaactcgagggtgacaacgcgcgcctagccgtactaaaacgcagcatcgaggtcacccactttgcctacccggcacttaacctaccccccaaggtcatgagcacagtcatgagtgagctgatcgtgcgccgtgcgcagcccctggagagggatgcaaatttgcaagaacaaacagaggagggcctacccgcagttggcgacgagcagctagcgcgctggcttcaaacgcgcgagcctgccgacttggaggagcgacgcaaactaatgatggccgcagtgctcgttaccgtggagcttgagtgcatgcagcggttctttgctgacccggagatgcagcgcaagctagaggaaacattgcactacacctttcgacagggctacgtacgccaggcctgcaagatctccaacgtggagctctgcaacctggtctcctaccttggaattttgcacgaaaaccgccttgggcaaaacgtgcttcattccacgctcaagggcgaggcgcgccgcgactacgtccgcgactgcgtttacttatttctatgctacacctggcagacggccatgggcgtttggcagcagtgcttggaggagtgcaacctcaaggagctgcagaaactgctaaagcaaaacttgaaggacctatggacggccttcaacgagcgctccgtggccgcgcacctggcggacatcattttccccgaacgcctgcttaaaaccctgcaacagggtctgccagacttcaccagtcaaagcatgttgcagaactttaggaactttatcctagagcgctcaggaatcttgcccgccacctgctgtgcacttcctagcgactttgtgcccattaagtaccgcgaatgccctccgccgctttggggccactgctaccttctgcagctagccaactaccttgcctaccactctgacataatggaagacgtgagcggtgacggtctactggagtgtcactgtcgctgcaacctatgcaccccgcaccgctccctggtttgcaattcgcagctgcttaacgaaagtcaaattatcggtacctttgagctgcagggtccctcgcctgacgaaaagtccgcggctccggggttgaaactcactccggggctgtggacgtcggcttaccttcgcaaatttgtacctgaggactaccacgcccacgagattaggttctacgaagaccaatcccgcccgcctaatgcggagcttaccgcctgcgtcattacccagggccacattcttggccaattgcaagccatcaacaaagcccgccaagagtttctgctacgaaagggacggggggtttacttggacccccagtccggcgaggagctcaacccaatccccccgccgccgcagccctatcagcagcagccgcgggcccttgcttcccaggtgatgagcacccaaaaagaagctgcagctgccgccgccacccacggacgaggaggaatactgggacagtcaggcagaggaggttttggacgaggaggaggaggacatgatggaagactgggagagcctagacgaggaagcttccgaggtcgaagaggtgtcagacgaaacaccgtcaccctcggtcgcattcccctcgccggcgccccagaaatcggcaaccggttccagcatggctacaacctccgctcctcaggcgccgccggcactgcccgttcgccgacccaaccgtagatgggacaccactggaaccagggccggtaagtccaagcagccgccgccgttagcccaagagcaacaacagcgccaaggctaccgctcatggcgcgggcacaagaacgccatagttgcttgcttgcaagactgtgggggcaacatctccttcgcccgccgctttcttctctaccatcacggcgtggccttcccccgtaacatcctgcattactaccgtcatctctacagcccatactgcaccggcggcagcggcagcaacagcagcggccacacagaagcaaaggcgaccggatagcaagactctgacaaagcccaagaaatccacagcggcggcagcagcaggaggaggagcgctgcgtctggcgcccaacgaacccgtatcgacccgcgagcttagaaacaggatttttcccactctgtatgctatatttcaacagagcaggggccaagaacaagagctgaaaataaaaaacaggtctctgcgatccctcacccgcagctgcctgtatcacaaaagcgaagatcagcttcggcgcacgctggaagacgcggaggctctcttcagtaaatactgcgcgctgactcttaaggactagtttcgcgccctttctcaaatttaagcgcgaaaactacgtcatctccagcggccacacccggcgccagcacctgttgtcagcgccattttttagggcggagtaacttgtatgtgttgggaattgtagttttcttaaaatgggaagtgacgtaacgtgggaaaacggaagtgacgatttgaggaagttgtgggttttttggctttcgtttctgggcgtaggttcgcgtgcggttttctgggtgttttttgtggactttaaccgttacgtcattttttagtcctatatatactcgctctgcacttggcccttttttacactgtgactgattgagctggtgccgtgtcgagtggtgtttttttaataggttttcttttttactggtaaggctgactgttatgactacgtccggcgttccatttggcatgacactacgaccaacacgatctcggttgtctcggcgcactccgtacagtagggatcgtctacctccttttgagacagaaacccgcgctaccatactggaggatcatccgctgctgcccgaatgtaacactttgacaatgcacaacgtgagttacgtgcgaggtcttccctgcagtgtgggatttacgctgattcaggaatgggttgttccctgggatatggttctaacgcgggaggagcttgtaatcctgaggaagtgtatgcacgtgtgcctgtgttgtgccaacattgatatcatgacgagcatgatgatccatggttacgagtcctgggctctccactgtcattgttccagtcccggttccctgcagtgtatagccggcgggcaggttttggccagctggtttaggatggtggtggatggcgccatgtttaatcagaggtttatatggtaccgggaggtggtgaattacaacatgccaaaagaggtaatgtttatgtccagcgtgtttatgaggggtcgccacttaatctacctgcgcttgtggtatgatggccacgtgggttctgtggtccccgccatgagctttggatacagcgccttgcactgtgggattttgaacaatattgtggtgctgtgctgcagttactgtgctgatttaagtgagatcagggtgcgctgctgtgcccggaggacaaggcgccttatgctgcgggcggtgcgaatcatcgctgaggagaccactgccatgttgtattcctgcaggacggagcggcggcggcagcagtttattcgcgcgctgctgcagcaccaccgccctatcctgatgcacgattatgactctacccccatgtaggcgtggacttctccttcgccgcccgttaagcaaccgcaagttggacagcagcctgtggctcagcagctggacagcgacatgaacttaagtgagctgcccggggagtttattaatatcactgatgagcgtttggctcgacaggaaaccgtgtggaatataacacctaagaatatgtctgttacccatgatatgatgctttttaaggccagccggggagaaaggactgtgtactctgtgtgttgggagggaggtggcaggttgaatactagggttctgtgagtttgattaaggtacggtgatctgtataagctatgtggtggtggggctatactactgaatgaaaaatgacttgaaattttctgcaattgaaaaataaacacgttgaaacataacacaaacgattctttattcttgggcaatgtatgaaaaagtgtaagaggatgtggcaaatatttcattaatgtagttgtggccagaccagtcccatgaaaatgacatagagtatgcacttggagttgtgtctcctgtttcctgtgtaccgtttagtgtaatggttagtgttacaggtttagttttgtctccgtttaagtaaacttgactgacaatgttacttttggcagttttaccgtgagattttggataagctgataggttaggcataaatccaacagcgtttgtataggctgtcgcccctcctgacgcggtaggaggaggggagggtgccctgcatgtctgccgctgctcttgctcttgccgctgctgaggaggggggcgcatctgccgcagcaccggatgcatctgggaaaagcaaaaaaggggctcgtccctgtttccggaggaatttgcaagcggggtcttgcatgacggggaggcaaacccccgttcgccgcagtccggccggtccgagactcgaaccgggggtcccgcgactcaacccttggaaaataaccctccggctacagggagcgagccacttaatgctttcgctttccagcctaaccgcttacgctgcgcgcggccagtggccaaaaaagctagcgcagcagccgccgcgcctggaaggaagccaaaaggagcactcccccgttgtctgacgtcgcacacctgggttcgacacgcgggcggtaaccgcatggatcacggcggacggccggatacggggctcgaaccccggtcgtccgccatgatacccttgcgaatttatccaccagaccacggaagagtgcccgcttacaggctctccttttgcacggtctagagcgtcaacgattgcgcgcgcctgaccggccagagcgtcccgaccatggagcactttttgccgctgcgcaacatctggaaccgcgtccgcgactttccgcgcgcctccaccaccgccgccggcatcacctggatgtccaggtacatctacggatatggcaaacagctattatgggtattatgggtgcggccgcggatcccgggcccgtcgactgcagaggcctgcatgcaagcttggtgtaatcatggtcatagctgtttcctgtgtgaaattgttatccgctcacaattccacacaacatacgagccggaagcataaagtgtaaagcctggggtgcctaatgagtgagctaactcacattaattgcgttgcgctcactgcccgctttccagtcgggaaacctgtcgtgccagctgcattaatgaatcggccaacgcgcggggagaggcggtttgcgtattgggcgctcttccgcttcctcgctcactgactcgctgcgctcggtcgttcggctgcggcgagcggtatcagctcactcaaaggcggtaatacggttatccacagaatcaggggataacgcaggaaagaacatgtgagcaaaaggccagcaaaaggccaggaaccgtaaaaaggccgcgttgctggcgtttttccataggctccgcccccctgacgagcatcacaaaaatcgacgctcaagtcagaggtggcgaaacccgacaggactataaagataccaggcgtttccccctggaagctccctcgtgcgctctcctgttccgaccctgccgcttaccggatacctgtccgcctttctcccttcgggaagcgtggcgctttctcatagctcacgctgtaggtatctcagttcggtgtaggtcgttcgctccaagctgggctgtgtgcacgaaccccccgttcagcccgaccgctgcgccttatccggtaactatcgtcttgagtccaacccggtaagacacgacttatcgccactggcagcagccactggtaacaggattagcagagcgaggtatgtaggcggtgctacagagttcttgaagtggtggcctaactacggctacactagaagaacagtatttggtatctgcgctctgctgaagccagttaccttcggaaaaagagttggtagctcttgatccggcaaacaaaccaccgctggtagcggtggtttttttgtttgcaagcagcagattacgcgcagaaaaaaaggatctcaagaagatcctttgatcttttctacggggtctgacgctcagtggaacgaaaactcacgttaagggattttggtcatgagattatcaaaaaggatcttcacctagatccttttaaattaaaaatgaagttttaaatcaagcccaatctgaataatgttacaaccaattaaccaattctgattagaaaaactcatcgagcatcaaatgaaactgcaatttattcatatcaggattatcaataccatatttttgaaaaagccgtttctgtaatgaaggagaaaactcaccgaggcagttccataggatggcaagatcctggtatcggtctgcgattccgactcgtccaacatcaatacaacctattaatttcccctcgtcaaaaataaggttatcaagtgagaaatcaccatgagtgacgactgaatccggtgagaatggcaaaagtttatgcatttctttccagacttgttcaacaggccagccattacgctcgtcatcaaaatcactcgcatcaaccaaaccgttattcattcgtgattgcgcctgagcgagacgaaatacgcgatcgctgttaaaaggacaattacaaacaggaatcgaatgcaaccggcgcaggaacactgccagcgcatcaacaatattttcacctgaatcaggatattcttctaatacctggaatgctgtttttccggggatcgcagtggtgagtaaccatgcatcatcaggagtacggataaaatgcttgatggtcggaagaggcataaattccgtcagccagtttagtctgaccatctcatctgtaacatcattggcaacgctacctttgccatgtttcagaaacaactctggcgcatcgggcttcccatacaagcgatagattgtcgcacctgattgcccgacattatcgcgagcccatttatacccatataaatcagcatccatgttggaatttaatcgcggcctcgacgtttcccgttgaatatggctcataacaccccttgtattactgtttatgtaagcagacagttttattgttcatgatgatatatttttatcttgtgcaatgtaacatcagagattttgagacacgggccagagctgca

SEQ ID NO: 44 - DNA, 15420 bp, synthetic construct
  source 1..15420: mol_type = other DNA
tcgacggtatcgataagcttgatatcgaattcctgcagcccgggggatccactagttctagagcggccgccaccgcggtggagctccagcttttgttccctttagtgagggttaattgcgcgcttggcgtaatcatggtcatagctgtttcctgtgtgaaattgttatccgctcacaattccacacaacatacgagccggaagcataaagtgtaaagcctggggtgcctaatgagtgagctaactcacattaattgcgttgcgctcactgcccgctttccagtcgggaaacctgtcgtgccagctgcattaatgaatcggccaacgcgcggggagaggcggtttgcgtattgggcgctcttccgcttcctcgctcactgactcgctgcgctcggtcgttcggctgcggcgagcggtatcagctcactcaaaggcggtaatacggttatccacagaatcaggggataacgcaggaaagaacatgtgagcaaaaggccagcaaaaggccaggaaccgtaaaaaggccgcgttgctggcgtttttccataggctccgcccccctgacgagcatcacaaaaatcgacgctcaagtcagaggtggcgaaacccgacaggactataaagataccaggcgtttccccctggaagctccctcgtgcgctctcctgttccgaccctgccgcttaccggatacctgtccgcctttctcccttcgggaagcgtggcgctttctcatagctcacgctgtaggtatctcagttcggtgtaggtcgttcgctccaagctgggctgtgtgcacgaaccccccgttcagcccgaccgctgcgccttatccggtaactatcgtcttgagtccaacccggtaagacacgacttatcgccactggcagcagccactggtaacaggattagcagagcgaggtatgtaggcggtgctacagagttcttgaagtggtggcctaactacggctacactagaagaacagtatttggtatctgcgctctgctgaagccagttaccttcggaaaaagagttggtagctcttgatccggcaaacaaaccaccgctggtagcggtggtttttttgtttgcaagcagcagattacgcgcagaaaaaaaggatctcaagaagatcctttgatcttttctacggggtctgacgctcagtggaacgaaaactcacgttaagggattttggtcatgagattatcaaaaaggatcttcacctagatccttttaaattaaaaatgaagttttaaatcaatctaaagtatatatgagtaaacttggtctgacagttaccaatgcttaatcagtgaggcacctatctcagcgatctgtctatttcgttcatccatagttgcctgactccccgtcgtgtagataactacgatacgggagggcttaccatctggccccagtgctgcaatgataccgcgagacccacgctcaccggctccagatttatcagcaataaaccagccagccggaagggccgagcgcagaagtggtcctgcaactttatccgcctccatccagtctattaattgttgccgggaagctagagtaagtagttcgccagttaatagtttgcgcaacgttgttgccattgctacaggcatcgtggtgtcacgctcgtcgtttggtatggcttcattcagctccggttcccaacgatcaaggcgagttacatgatcccccatgttgtgcaaaaaagcggttagctccttcggtcctccgatcgttgtcagaagtaagttggccgcagtgttatcactcatggttatggcagcactgcataattctcttactgtcatgccatccgtaagatgcttttctgtgactggtgagtactcaaccaagtcattctgagaatagtgtatgcggcgaccgagttgctcttgcccggcgtcaatacgggataataccgcgccacatagcagaactttaaaagtgctcatcattggaaaacgttcttcggggcgaaaactctcaaggatcttaccgctgttgagatccagttcgatgtaacccactcgtgcacccaactgatcttcagcatcttttactttcaccagcgtttctgggtgagcaaaaacaggaaggcaaaatgccgcaaaaaagggaataagggcgacacggaaatgttgaatactcatactcttcctttttcaatattattgaagcatttatcagggttattgtctcatgagcggatacatatttgaatgtatttagaaaaataaacaaataggggttccgcgcacatttccccgaaaagtgccacctgacgtctaagaaaccattattatcatgacattaacctataaaaataggcgtatcacgaggccctttcgtcttcaagaattctcatgtttgacagcttatcatcgataagctttaatgcggtagtttatcacagttaaattgctaacgcagtcaggcaccgtgtatgaaatctaacaatgcgctcatcgtcatcctcggcaccgtcaccctggatgctgtaggcataggcttggttatgccggtactgccgggcctcttgcgggatatcgtccattccgacagcatcgccagtcactatggcgtgctgctagcgctatatgcgttgatgcaatttctatgcgcacccgttctcggagcactgtccgaccgctttggccgccgcccagtcctgctcgcttcgctacttggagccactatcgactacgcgatcatggcgaccacacccgtcctgtggatccggcgcacaccaaaaacgtcacttttgccacatccgtcgcttacatgtgttccgccacacttgcaacatcacacttccgccacactactacgtcacccgccccgttcccacgccccgcgccacgtcacaaactccaccccctcattatcatattggcttcaatccaaaataatcatcaataatataccttattttggattgaagccaatatgataatgagggggtggagtttgtgacgtggcgcggggcgtgggaacggggcgggtgacgtaggttttagggcggagtaacttgtatgtgttgggaattgtagttttcttaaaatgggaagtgacgtaacgtgggaaaacggaagtgacgatttgaggaagttgtgggttttttggctttcgtttctgggcgtaggttcgcgtgcggttttctgggtgttttttgtggactttaaccgttacgtcattttttagtcctatatatactcgctctgcacttggcccttttttacactgtgactgattgagctggtgccgtgtcgagtggtgtttttttaataggttttcttttttactggtaaggctgactgttatggctgccgctgtggaagcgctgtatgttgttctggagcgggagggtgctattttgcctaggcaggagggtttttcaggtgtttatgtgtttttctctcctattaattttgttatacctcctatgggggctgtaatgttgtctctacgcctgcgggtatgtattcccccgggctatttcggtcgctttttagcactgaccgatgtgaatcaacctgatgtgtttaccgagtcttacattatgactccggacatgaccgaggagctgtcggtggtgctttttaatcacggtgaccagtttttttacggtcacgccggcatggccgtagtccgtcttatgcttataagggttgtttttcctgttgtaagacaggcttctaatgtttaaatgtttttttgttattttattttgtgtttatgcagaaacccgcagacatgtttgagagaaaaatggtgtctttttctgtggtggttccggagcttacctgcctttatctgcatgagcatgactacgatgtgctttcttttttgcgcgaggctttgcctgattttttgagcagcaccttgcattttatatcgccgcccatgcaacaagcttacatcggggctacgctggttagcatagctccgagtatgcgtgtcataatcagtgtgggttcttttgtcatggttcctggcggggaagtggccgcgctggtccgtgcagacctgcacgattatgttcagctggccctgcgaagggacctacgggatcgcggtatttttgttaatgttccgcttttgaatcttatacaggtctgtgaggaacctgaatttttgcaatcatgattcgctgcttgaggctgaaggtggagggcgctctggagcagatttttacaatggccggacttaatattcgggatttgcttagagatatattgagaaggtggcgagatgagaattatttgggcatggttgaaggtgctggaatgtttatagaggagattcaccctgaagggtttagcctttacgtccacttggacgtgagggccgtttgccttttggaagccattgtgcaacatcttacaaatgccattatctgttctttggctgtagagtttgaccacgccaccggaggggagcgcgttcacttaatagatcttcattttgaggttttggataatcttttggaataaaaaaaaaaacatggttcttccagctcttcccgctcctcccgtgtgtgactcgcagaacgaatgtgtaggttggctgggtgtggcttattctgcggtggtggatgttatcagggcagcggcgcatgaaggagtttacatagaacccgaagccagggggcgcctggatgctttgagagagtggatatactacaactactacacagagcgatctaagcggcgagaccggagacgcagatctgtttgtcacgcccgcacctggttttgcttcaggaaatatgactacgtccggcgttccatttggcatgacactacgaccaacacgatctcggttgtctcggcgcactccgtacagtagggatcgtctacctccttttgagacagaaacccgcgctaccatactggaggatcatccgctgctgcccgaatgtaacactttgacaatgcacaacgtgagttacgtgcgaggtcttccctgcagtgtgggatttacgctgattcaggaatgggttgttccctgggatatggttctaacgcgggaggagcttgtaatcctgaggaagtgtatgcacgtgtgcctgtgttgtgccaacattgatatcatgacgagcatgatgatccatggttacgagtcctgggctctccactgtcattgttccagtcccggttccctgcagtgtatagccggcgggcaggttttggccagctggtttaggatggtggtggatggcgccatgtttaatcagaggtttatatggtaccgggaggtggtgaattacaacatgccaaaagaggtaatgtttatgtccagcgtgtttatgaggggtcgccacttaatctacctgcgcttgtggtatgatggccacgtgggttctgtggtccccgccatgagctttggatacagcgccttgcactgtgggattttgaacaatattgtggtgctgtgctgcagttactgtgctgatttaagtgagatcagggtgcgctgctgtgcccggaggacaaggcgccttatgctgcgggcggtgcgaatcatcgctgaggagaccactgccatgttgtattcctgcaggacggagcggcggcggcagcagtttattcgcgcgctgctgcagcaccaccgccctatcctgatgcacgattatgactctacccccatgtaggcgtggacttctccttcgccgcccgttaagcaaccgcaagttggacagcagcctgtggctcagcagctggacagcgacatgaacttaagtgagctgcccggggagtttattaatatcactgatgagcgtttggctcgacaggaaaccgtgtggaatataacacctaagaatatgtctgttacccatgatatgatgctttttaaggccagccggggagaaaggactgtgtactctgtgtgttgggagggaggtggcaggttgaatactagggttctgtgagtttgattaaggtacggtgatctgtataagctatgtggtggtggggctatactactgaatgaaaaatgacttgaaattttctgcaattgaaaaataaacacgttgaaacataacacaaacgattctttattcttgggcaatgtatgaaaaagtgtaagaggatgtggcaaatatttcattaatgtagttgtggccagaccagtcccatgaaaatgacatagagtatgcacttggagttgtgtctcctgtttcctgtgtaccgtttagtgtaatggttagtgttacaggtttagttttgtctccgtttaagtaaacttgactgacaatgttacttttggcagttttaccgtgagattttggataagctgataggttaggcataaatccaacagcgtttgtataggctgtgccttcagtaagatctccatttctaaagttccaatattctgggtccaggaaggaattgtttagtagcactccattttcgtcaaatcttataataagatgagcactttgaactgttccagatattggagccaaactgcctttaacagccaaaactgaaactgtagcaagtatttgactgccacattttgttaagaccaaagtgagtttagcatctttctctgcatttagtctacagttaggagatggagctggtgtggtccacaaagttagcttatcattatttttgtttcctactgtaatggcacctgtgctgtcaaaactaaggccagttcctagtttaggaaccatagccttgtttgaatcaaattctaggccatggccaatttttgttttgaggggatttgtgtttggtgcattaggtgaaccaaattcaagcccatctcctgcattaatggctatggctgtagcgtcaaacatcaaccccttggcagtgcttaggttaacctcaagctttttggaattgtttgaagctgtaaacaagtaaaggcctttgttgtagttaatatccaagttgtgggctgagtttataaaaagagggccctgtcctagtcttagatttagttggttttgagcatcaaacggataactaacatcaagtataaggcgtctgttttgagaatcaatccttagtcctcctgctacattaagttgcatattgccttgtgaatcaaaacccaaggctccagtaactttagtttgcaaggaagtattattaatagtcacacctggaccagttgctacggtcaaagtgtttaggtcgtctgttacatgcaaaggagccccgtactttagtcctagttttccattttgtgtataaatgggctctttcaagtcaatgcccaagctaccagtggcagtagttagagggggtgaggcagtgatagtaagggtactgctatcggtggtggtgagggggcctgatgtttgcagggctagctttccttctgacactgtgaggggtccttgggtggcaatgctaagtttggagtcgtgcacggttagcggggcctgtgattgcatggtgagtgtgttgcccgcgaccattagaggtgcggcggcagccacagttagggcttctgaggtaactgtgaggggtgcagatatttccaggtttatgtttgacttggtttttttgagaggtgggctcacagtggttacattttgggaggtaaggttgccggcctcgtccagagagaggccgttgcccattttgagcgcaagcatgccattggaggtaactagaggttcggataggcgcaaagagagtaccccagggggactctcttgaaacccattgggggatacaaagggaggagtaagaaaaggcacagttggaggaccggtttccgtgtcatatggatacacggggttgaaggtatcttcagacggtcttgcgcgcttcatctgcaacaacatgaagatagtgggtgcggatggacaggaacaggaggaaactgacattccatttagattgtggagaaagtttgcagccaggaggaagctgcaataccagagctgggaggagggcaaggaggtgctgctgaataaactggacagaaatttgctaactgattttaagtaagtgatgctttattatttttttttattagttaaagggaataagatccccgggtactctagttaattaactagaggatcttgatgtaatccagggttaggacagttgcaaatcacagtgagaacacagggtcccctgtcccgctcaactagcagggggcgctgggtaaactcccgaatcaggctacgggcaagctctccctgggcggtaagccggacgccgtgcgccgggccctcgatatgatcctcgggcaattcaaagtagcaaaactcaccggagtcgcgggcaaagcacttgtggcggcgacagtggaccaggtgtttcaggcgcagttgctctgcctctccacttaacattcagtcgtagccgtccgccgagtcctttaccgcgtcaaagttaggaataaattgatccggatagtggccgggaggtcccgagaaggggttaaagtagaccgatggcacaaactcctcaataaattgcagagttccaatgcctccagagcgcggctcagaggacgaggtctgcagagttaggattgcctgacgaggcgtgaatgaagagcggccggcgccgccgatctgaaatgtcccgtccggacggagaccaagcgaggagctcaccgactcgtcgttgagctgaatacctcgccctctgattgtcaggtgagttataccctgcccgggcgaccgcaccctgtgacgaaagccgcccgcaagctgcgcccctgagttagtcatctgaacttcggcctgggcgtctctgggaagtaccacagtggtgggagcgggactttcctggtacaccagggcagcgggccaactacggggattaaggttattacgaggtgtggtggtaatagccgcctgttccaggagaattcggtttcggtgggcgcgtattccgttgacccgggatatcatgtggggtcccgcgctcatgtagtttattcgggttgagtagtcttgggcagctccagccgcaagtcccatttgtggctggtaactccacatgtagggcgtgggaatttccttgctcataatggcgctgacaacaggtgctggcgccgggtgtggccgctggagatgacgtagttttcgcgcttaaatttgagaaagggcgcgaaactagtccttaagagtcagcgcgcagtatttactgaagagagcctccgcgtcttccagcgtgcgccgaagctgatcttcgcttttgtgatacaggcagctgcgggtgagggatcgcagagacctgttttttattttcagctcttgttcttggcccctgctctgttgaaatatagcatacagagtgggaaaaatcctgtttctaagctcgcgggtcgatacgggttcgttgggcgccagacgcagcgctcctcctcctgctgctgccgccgctgtggatttcttgggctttgtcagagtcttgctatccggtcgcctttgcttctgtgtggccgctgctgttgctgccgctgccgccggtgcagtatgggctgtagagatgacggtagtaatgcaggatgttacgggggaaggccacgccgtgatggtagagaagaaagcggcgggcgaaggagatgttgcccccacagtcttgcaagcaagcaactatggcgttcttgtgcccgcgccatgagcggtagccttggcgctgttgttgctcttgggctaacggcggcggctgcttggacttaccggccctggttccagtggtgtcccatctacggttgggtcggcgaacgggcagtgccggcggcgcctgaggagcggaggttgtagccatgctggaaccggttgccgatttctggggcgccggcgaggggaatgcgaccgagggtgacggtgtttcgtctgacacctcttcgacctcggaagcttcctcgtctaggctctcccagtcttccatcatgtcctcctcctcctcgtccaaaacctcctctgcctgactgtcccagtattcctcctcgtccgtgggtggcggcggcagctgcagcttctttttgggtgccatcctgggaagcaagggcccgcggctgctgctgatagggctgcggcggcggggggattgggttgagctcctcgccggactgggggtccaagtaaaccccccgtccctttcgtagcagaaactcttggcgggctttgttgatggcttgcaattggccaagaatgtggccctgggtaatgacgcaggcggtaagctccgcattaggcgggcgggattggtcttcgtagaacctaatctcgtgggcgtggtagtcctcaggtacaaatttgcgaaggtaagccgacgtccacagccccggagtgagtttcaaccccggagccgcggacttttcgtcaggcgagggaccctgcagctcaaaggtaccgataatttgactttcgttaagcagctgcgaattgcaaaccagggagcggtgcggggtgcataggttgcagcgacagtgacactccagtagaccgtcaccgctcacgtcttccattatgtcagagtggtaggcaaggtagttggctagctgcagaaggtagcagtggccccaaagcggcggagggcattcgcggtacttaatgggcacaaagtcgctaggaagtgcacagcaggtggcgggcaagattcctgagcgctctaggataaagttcctaaagttctgcaacatgctttgactggtgaagtctggcagaccctgttgcagggttttaagcaggcgttcggggaaaatgatgtccgccaggtgcgcggccacggagcgctcgttgaaggccgtccataggtccttcaagttttgctttagcagtttctgcagctccttgaggttgcactcctccaagcactgctgccaaacgcccatggccgtctgccaggtgtagcatagaaataagtaaacgcagtcgcggacgtagtcgcggcgcgcctcgcccttgagcgtggaatgaagcacgttttgcccaaggcggttttcgtgcaaaattccaaggtaggagaccaggttgcagagctccacgttggagatcttgcaggcctggcgtacgtagccctgtcgaaaggtgtagtgcaatgtttcctctagcttgcgctgcatctccgggtcagcaaagaaccgctgcatgcactcaagctccacggtaacgagcactgcggccatcattagtttgcgtcgctcctccaagtcggcaggctcgcgcgtttgaagccagcgcgctagctgctcgtcgccaactgcgggtaggccctcctctgtttgttcttgcaaatttgcatccctctccaggggctgcgcacggcgcacgatcagctcactcatgactgtgctcatgaccttggggggtaggttaagtgccgggtaggcaaagtgggtgacctcgatgctgcgttttagtacggctaggcgcgcgttgtcaccctcgagttccaccaacactccagagtgactttcattttcgctgttttcctgttgcagagcgtttgccgcgcgcttctcgtcgcgtccaagaccctcaaagatttttggcacttcgttgagcgaggcgatatcaggtatgacagcgccctgccgcaaggccagctgcttgtccgctcggctgcggttggcacggcaggataggggtatcttgcagttttggaaaaagatgtgataggtggcaagcacctctggcacggcaaatacggggtagaagttgaggcgcgggttgggctcgcatgtgccgttttcttggcgtttggggggtacgcgcggtgagaataggtggcgttcgtaggcaaggctgacatccgctatggcgaggggcacatcgctgcgctcttgcaacgcgtcgcagataatggcgcactggcgctgcagatgcttcaacagcacgtcgtctcccacatctaggtagtcgccatgcctttcgtccccccgcccgacttgttcctcgtttgcctctgcgttgtcctggtcttgctttttatcctctgttggtactgagcggtcctcgtcgtcttcgcttacaaaacctgggtcctgctcgataatcacttcctcctcctcaagcgggggtgcctcgacggggaaggtggtaggcgcgttggcggcatcggtggaggcggtggtggcgaactcagagggggcggttaggctgtccttcttctcgactgactccatgatctttttctgcctataggagaaggaaatggccagtcgggaagaggagcagcgcgaaaccacccccgagcgcggacgcggtgcggcgcgacgtcccccaaccatggaggacgtgtcgtccccgtccccgtcgccgccgcctccccgggcgcccccaaaaaagcggatgaggcggcgtatcgagtccgaggacgaggaagactcatcacaagacgcgctggtgccgcgcacacccagcccgcggccatcgacctcggcggcggatttggccattgcgcccaagaagaaaaagaagcgcccttctcccaagcccgagcgcccgccatcaccagaggtaatcgtggacagcgaggaagaaagagaagatgtggcgctacaaatggtgggtttcagcaacccaccggtgctaatcaagcatggcaaaggaggtaagcgcacagtgcggcggctgaatgaagacgacccagtggcgcgtggtatgcggacgcaagaggaagaggaagagcccagcgaagcggaaagtgaaattacggtgatgaacccgctgagtgtgccgatcgtgtctgcgtgggagaagggcatggaggctgcgcgcgcgctgatggacaagtaccacgtggataacgatctaaaggcgaacttcaaactactgcctgaccaagtggaagctctggcggccgtatgcaagacctggctgaacgaggagcaccgcgggttgcagctgaccttcaccagcaacaagacctttgtgacgatgatggggcgattcctgcaggcgtacctgcagtcgtttgcagaggtgacctacaagcatcacgagcccacgggctgcgcgttgtggctgcaccgctgcgctgagatcgaaggcgagcttaagtgtctacacggaagcattatgataaataaggagcacgtgattgaaatggatgtgacgagcgaaaacgggcagcgcgcgctgaaggagcagtctagcaaggccaagatcgtgaagaaccggtggggccgaaatgtggtgcagatctccaacaccgacgcaaggtgctgcgtgcacgacgcggcctgtccggccaatcagttttccggcaagtcttgcggcatgttcttctctgaaggcgcaaaggctcaggtggcttttaagcagatcaaggcttttatgcaggcgctgtatcctaacgcccagaccgggcacggtcaccttttgatgccactacggtgcgagtgcaactcaaagcctgggcacgcgccctttttgggaaggcagctaccaaagttgactccgttcgccctgagcaacgcggaggacctggacgcggatctgatctccgacaagagcgtgctggccagcgtgcaccacccggcgctgatagtgttccagtgctgcaaccctgtgtatcgcaactcgcgcgcgcagggcggaggccccaactgcgacttcaagatatcggcgcccgacctgctaaacgcgttggtgatggtgcgcagcctgtggagtgaaaacttcaccgagctgccgcggatggttgtgcctgagtttaagtggagcactaaacaccagtatcgcaacgtgtccctgccagtggcgcatagcgatgcgcggcagaacccctttgatttttaaacggcgcagacggcaagggtgggggtaaataatcacccgagagtgtacaaataaaagcatttgcctttattgaaagtgtctctagtacattatttttacatgtttttcaagtgacaaaaagaagtggcgctcctaatctgcgcactgtggctgcggaagtagggcgagtggcgctccaggaagctgtagagctgttcctggttgcgacgcagggtgggctgtacctggggactgttgagcatggagttgggtaccccggtaataaggttcatggtggggttgtgatccatgggagtttggggccagttggcaaaggcgtggagaaacatgcagcagaatagtccacaggcggccgagttgggcccctgtacgctttgggtggacttttccagcgttatacagcggtcgggggaagaagcaatggcgctacggcgcaggagtgactcgtactcaaactggtaaacctgcttgagtcgctggtcagaaaagccaaagggctcaaagaggtagcatgtttttgagtgcgggttccaggcaaaggccatccagtgtacgcccccagtctcggtccgagactcgaaccgggggtcccgcgactcaacccttggaaaataaccctccggctacagggagcgagccacttaatgctttcgctttccagcctaaccgcttacgctgcgcgcggccagtggccaaaaaagctagcgcagcagccgccgcgcctggaaggaagccaaaaggagcactcccccgttgtctgacgtcgcacacctgggttcgacacgcgggcggtaaccgcatggatcacggcggacggccggatacggggctcgaaccccggtcgtccgccatgatacccttgcgaatttatccaccagaccacggaagagtgcccgcttacaggctctccttttgcacgctagagcgtcaacgattgcgcgcgcctgaccggccagagcgtcccgaccatggagcactttttgccgctgcgcaacatctggaaccgcgtccgcgactttccgcgcgcctccaccaccgccgccggcatcacctggatgtccaggtacatctacggatatcatcgccttatgttggaagatctcgcccccggagccccggccaccctacgctggcccctctaccgccagccgccgccgcactttttggtgggataccagtacctggtgcggacttgcaacgactacgtatttgactcgagggcttactcgcgtctcaggtacaccgagctctcgcagccgggtcaccagaccgttaactggtccgttatggccaactgcacttacaccatcaacacgggcgcataccaccgctttgtggacatggatgacttccagtctaccctcacgcaggtgcagcaggccatattagccgagcgcgttgtcgccgacctagccctgcttcagccgatgaggggcttcggggtcacacgcatgggaggaagagggcgccacctacggccaaactccgccgccgccgcagcgatagatgcaagagatgcaggacaagaggaaggagaagaagaagtgccggtagaaaggctcatgcaagactactacaaagacctgcgccgatgtcaaaacgaagcctggggcatggccgaccgcctgcgcattcagcaggccggacccaaggacatggtgcttctg

SEQ ID NO: 45 - protein, 529 aa, synthetic construct
MASREEEQRETTPERGRGAARRPPTMEDVSSPSPSPPPPRAPPKKRMRRRIESEDEEDSSQDALVPRTPSPRPSTSAADLAIAPKKKKKRPSPKPERPPSPEVIVDSEEEREDVALQMVGFSNPPVLIKHGKGGKRTVRRLNEDDPVARGMRTQEEEEEPSEAESEITVMNPLSVPIVSAWEKGMEAARALMDKYHVDNDLKANFKLLPDQVEALAAVCKTWLNEEHRGLQLTFTSNKTFVTMMGRFLQAYLQSFAEVTYKHHEPTGCALWLHRCAEIEGELKCLHGSIMINKEHVIEMDVTSENGQRALKEQSSKAKIVKNRWGRNVVQISNTDARCCVHDAACPANQFSGKSCGMFFSEGAKAQVAFKQIKAFMQALYPNAQTGHGHLLMPLRCECNSKPGHAPFLGRQLPKLTPFALSNAEDLDADLISDKSVLASVHHPALIVFQCCNPVYRNSRAQGGGPNCDFKISAPDLLNALVMVRSLWSENFTELPRMVVPEFKWSTKHQYRNVSLPVAHSDARQNPFDF

SEQ ID NO: 46 - protein, 294 aa, synthetic construct
MTTSGVPFGMTLRPTRSRLSRRTPYSRDRLPPFETETRATILEDHPLLPECNTLTMHNVSYVRGLPCSVGFTLIQEWVVPWDMVLTREELVILRKCMHVCLCCANIDIMTSMMIHGYESWALHCHCSSPGSLQCIAGGQVLASWFRMVVDGAMFNQRFIWYREVVNYNMPKEVMFMSSVFMRGRHLIYLRLWYDGHVGSVVPAMSFGYSALHCGILNNIVVLCCSYCADLSEIRVRCCARRTRRLMLRAVRIIAEETTAMLYSCRTERRRQQFIRALLQHHRPILMHDYDSTPM

SEQ ID NO: 47 - DNA, 1194 bp, synthetic construct
  source 1..1194: mol_type = other DNA
gttgaaactcactccggggctgtggacgtcggcttaccttcgcaaatttgtacctgaggactaccacgcccacgagattaggttctacgaagaccaatcccgcccgcctaatgcggagcttaccgcctgcgtcattacccagggccacattcttggccaattgcaagccatcaacaaagcccgccaagagtttctgctacgaaagggacggggggtttacttggacccccagtccggcgaggagctcaacccaatccccccgccgccgcagccctatcagcagcagccgcgggcccttgcttcccaggatggcacccaaaaagaagctgcagctgccgccgccacccacggacgaggaggaatactgggacagtcaggcagaggaggttttggacgaggaggaggaggacatgatggaagactgggagagcctagacgaggaagcttccgaggtcgaagaggtgtcagacgaaacaccgtcaccctcggtcgcattcccctcgccggcgccccagaaatcggcaaccggttccagcatggctacaacctccgctcctcaggcgccgccggcactgcccgttcgccgacccaaccgtagatgggacaccactggaaccagggccggtaagtccaagcagccgccgccgttagcccaagagcaacaacagcgccaaggctaccgctcatggcgcgggcacaagaacgccatagttgcttgcttgcaagactgtgggggcaacatctccttcgcccgccgctttcttctctaccatcacggcgtggccttcccccgtaacatcctgcattactaccgtcatctctacagcccatactgcaccggcggcagcggcagcaacagcagcggccacacagaagcaaaggcgaccggatagcaagactctgacaaagcccaagaaatccacagcggcggcagcagcaggaggaggagcgctgcgtctggcgcccaacgaacccgtatcgacccgcgagcttagaaacaggatttttcccactctgtatgctatatttcaacagagcaggggccaagaacaagagctgaaaataaaaaacaggtctctgcgatccctcacccgcagctgcctgtatcacaaaagcgaagatcagcttcggcgcacgctggaagacgcggaggctctcttcagtaaatactgcgcgctgactcttaaggactag

SEQ ID NO: 48 - DNA, 239 bp, synthetic construct
  source 1..239: mol_type = other DNA
gttgaaactcactccggggctgtggacgtcggcttaccttcgcaaatttgtacctgaggactaccacgcccacgagattaggttctacgaagaccaatcccgcccgcctaatgcggagcttaccgcctgcgtcattacccagggccacattcttggccaattgcaagccatcaacaaagcccgccaagagtttctgctacgaaagggacggggggtttacttggacccccagtccggcg

SEQ ID NO: 49 - DNA, 886 bp, synthetic construct
  source 1..886: mol_type = other DNA
atggcacccaaaaagaagctgcagctgccgccgccacccacggacgaggaggaatactgggacagtcaggcagaggaggttttggacgaggaggaggaggacatgatggaagactgggagagcctagacgaggaagcttccgaggtcgaagaggtgtcagacgaaacaccgtcaccctcggtcgcattcccctcgccggcgccccagaaatcggcaaccggttccagcatggctacaacctccgctcctcaggcgccgccggcactgcccgttcgccgacccaaccgtagatgggacaccactggaaccagggccggtaagtccaagcagccgccgccgttagcccaagagcaacaacagcgccaaggctaccgctcatggcgcgggcacaagaacgccatagttgcttgcttgcaagactgtgggggcaacatctccttcgcccgccgctttcttctctaccatcacggcgtggccttcccccgtaacatcctgcattactaccgtcatctctacagcccatactgcaccggcggcagcggcagcaacagcagcggccacacagaagcaaaggcgaccggatagcaagactctgacaaagcccaagaaatccacagcggcggcagcagcaggaggaggagcgctgcgtctggcgcccaacgaacccgtatcgacccgcgagcttagaaacaggatttttcccactctgtatgctatatttcaacagagcaggggccaagaacaagagctgaaaataaaaaacaggtctctgcgatccctcacccgcagctgcctgtatcacaaaagcgaagatcagcttcggcgcacgctggaagacgcggaggctctcttcagtaaatactgcgcgctgactcttaaggactag

SEQ ID NO: 50 - protein, 224 aa, synthetic construct
MAPKKKLQLPPPPTDEEEYWDSQAEEVLDEEEEDMMEDWESLDEEASEVEEVSDETPSPSVAFPSPAPQKSATGSSMATTSAPQAPPALPVRRPNRRWDTTGTHTAPAAAAATAAATQKQRRPDSKTLTKPKKSTAAAAAGGGALRLAPNEPVSTRELRNRIFPTLYAIFQQSRGQEQELKIKNRSLRSLTRSCLYHKSEDQLRRTLEDAEALFSKYCALTLKD

SEQ ID NO: 51 - protein, 288 aa, synthetic construct
MRHIICHGGVITEEMAASLLDQLIEEVLADNLPPPSHFEPPTLHELYDLDVTAPEDPNEEAVSQIFPDSVMLAVQEGIDLLTFPPAPGSPEPPHLSRQPEQPEQRALGPVSMPNLVPEVIDLTCHEAGFPPSDDEDEEGEEFVLDYVEHPGHGCRSCHYHRRNTGDPDIMCSLCYMRTCGMFVYPVSEPEPEPEPEPEPARPTRRPKMAPAILRRPTSPVSRECNSSTDSCDSGPSNTPPEIHPVVPLCPIKPVAVRVGGRRQAVECIEDLLNEPGQPLDLSCKRPRP

SEQ ID NO: 52 - protein, 706 aa, synthetic construct
MSSGNMKDKHRSYKRKGSPERGERKRHWQTTHHRSRSRSPIRHSGERGSGSYHQEHPISHLSSCTASKTSDQVMKTRESTSGKKDNRTNPYTVFSQHRASNPEAPGWCGFYWHSTRIARDGTNSIFNEMKQQFQQLQIDNKIGWDNTRELLFNQKKTLDQKYRNMFWHFRNNSDCERCNYWDDVYRRHLANVSSQTEADEITDEEMLSAAESMEADASNATNFSLLKQAGDVEENPGPMAFNPPVIRAFSQPAFTYVFKFPYPQWKEKEWLLHALLAHGTEQSMIQLRNCAPHPDEDIIRDDLLISLEDRHFGAVLCKAVYMATTTLMSHKQRNMFPRCDIIVQSELGEKNLHCHIIVGGEGLSKRNAKSSCAQFYGLILAEIIQRCKSLLATRPFEPEEADIFHTLKKAEREAWGGVTGGNMQILQYRDRRGDLHAQTVDPLRFFKNYLLPKNRCISSYKPDVCTSPDNWFILAEKTYSHTLINGLPLPEHYRKNYHATLDNEVIPGPQTMAYGGRGPWEHLPFTLHENGYCTDCGGYLPHSADNSMYTDRASETSTGDITPDLGDSDGEDTKPETSQVDYCPPKKRRLTAPASPPNSPASSVSTITFFNTWHAQPRDEDELREYERQASLLQKKRESRKRGEEETLADNSSQEQEPQPDPTQWGERLGLISSGTPNQPPIVLHCFEDLRPSDEDEGEYIGEKRQ

SEQ ID NO: 53 - protein, 197 aa, synthetic construct
LATQSQFQTLNLSENLQQRPLVWDLIQWLQAVAHQWQTITKAPTEWVVPREIGIAIPHGWATESSPPAPEPGPCPPTTTTSTSKSPTGHREEPPTTTPTSATAPPGGILTLTDSTATFHHVTGSDSSTTTGDSGPRDSASSSSTSRSRRSRRMKAPRPSPITSPAPSRCLRTRSTSCRTFSALPTRAACLRSRRTCS

SEQ ID NO: 54 - DNA, 163 bp, synthetic construct
  source 1..163: mol_type = other DNA
agcgggcactcttccgtggtctggtggataaattcgcaagggtatcatggcggacgaccggggttcgagccccgtatccggccgtccgccgtgatccatgcggttaccgcccgcgtgtcgaacccaggtgtgcgacgtcagacaacgggggagtgctcctttt

SEQ ID NO: 55 - DNA, 163 bp, synthetic construct
  source 1..163: mol_type = other DNA
ggctcgctccctgtagccggagggttattttccaagggttgagtcgcgggacccccggttcgagtctcggaccggccggactgcggcgaacgggggtttgcctccccgtcatgcaagaccccgcttgcaaattcctccggaaacagggacgagcccctttttt

SEQ ID NO: 56 - DNA, 9223 bp, synthetic construct
  source 1..9223: mol_type = other DNA
ttaaaaatcaaaggggttctgccgcgcatcgctatgcgccactggcagggacacgttgcgatactggtgtttagtgctccacttaaactcaggcacaaccatccgcggcagctcggtgaagttttcactccacaggctgcgcaccatcaccaacgcgtttagcaggtcgggcgccgatatcttgaagtcgcagttggggcctccgccctgcgcgcgcgagttgcgatacacagggttgcagcactggaacactatcagcgccgggtggtgcacgctggccagcacgctcttgtcggagatcagatccgcgtccaggtcctccgcgttgctcagggcgaacggagtcaactttggtagctgccttcccaaaaagggcgcgtgcccaggctttgagttgcactcgcaccgtagtggcatcaaaaggtgaccgtgcccggtctgggcgttaggatacagcgcctgcataaaagccttgatctgcttaaaagccacctgagcctttgcgccttcagagaagaacatgccgcaagacttgccggaaaactgattggccggacaggccgcgtcgtgcacgcagcaccttgcgtcggtgttggagatctgcaccacatttcggccccaccggttcttcacgatcttggccttgctagactgctccttcagcgcgcgctgcccgttttcgctcgtcacatccatttcaatcacgtgctccttatttatcataatgcttccgtgtagacacttaagctcgccttcgatctcagcgcagcggtgcagccacaacgcgcagcccgtgggctcgtgatgcttgtaggtcacctctgcaaacgactgcaggtacgcctgcaggaatcgccccatcatcgtcacaaaggtcttgttgctggtgaaggtcagctgcaacccgcggtgctcctcgttcagccaggtcttgcatacggccgccagagcttccacttggtcaggcagtagtttgaagttcgcctttagatcgttatccacgtggtacttgtccatcagcgcgcgcgcagcctccatgcccttctcccacgcagacacgatcggcacactcagcgggttcatcaccgtaatttcactttccgcttcgctgggctcttcctcttcctcttgcgtccgcataccacgcgccactgggtcgtcttcattcagccgccgcactgtgcgcttacctcctttgccatgcttgattagcaccggtgggttgctgaaacccaccatttgtagcgccacatcttctctttcttcctcgctgtccacgattacctctggtgatggcgggcgctcgggcttgggagaagggcgcttctttttcttcttgggcgcaatggccaaatccgccgccgaggtcgatggccgcgggctgggtgtgcgcggcaccagcgcgtcttgtgatgagtcttcctcgtcctcggactcgatacgccgcctcatccgcttttttgggggcgcccggggaggcggcggcgacggggacggggacgacacgtcctccatggttgggggacgtcgcgccgcaccgcgtccgcgctcgggggtggtttcgcgctgctcctcttcccgactggccatttccttctcctataggcagaaaaagatcatggagtcagtcgagaagaaggacagcctaaccgccccctctgagttcgccaccaccgcctccaccgatgccgccaacgcgcctaccaccttccccgtcgaggcacccccgcttgaggaggaggaagtgattatcgagcaggacccaggttttgtaagcgaagacgacgaggaccgctcagtaccaacagaggataaaaagcaagaccaggacaacgcagaggcaaacgaggaacaagtcgggcggggggacgaaaggcatggcgactacctagatgtgggagacgacgtgctgttgaagcatctgcagcgccagtgcgccattatctgcgacgcgttgcaagagcgcagcgatgtgcccctcgccatagcggatgtcagccttgcctacgaacgccacctattctcaccgcgcgtaccccccaaacgccaagaaaacggcacatgcgagcccaacccgcgcctcaacttctaccccgtatttgccgtgccagaggtgcttgccacctatcacatctttttccaaaactgcaagatacccctatcctgccgtgccaaccgcagccgagcggacaagcagctggccttgcggcagggcgctgtcatacctgatatcgcctcgctcaacgaagtgccaaaaatctttgagggtcttggacgcgacgagaagcgcgcggcaaacgctctgcaacaggaaaacagcgaaaatgaaagtcactctggagtgttggtggaactcgagggtgacaacgcgcgcctagccgtactaaaacgcagcatcgaggtcacccactttgcctacccggcacttaacctaccccccaaggtcatgagcacagtcatgagtgagctgatcgtgcgccgtgcgcagcccctggagagggatgcaaatttgcaagaacaaacagaggagggcctacccgcagttggcgacgagcagctagcgcgctggcttcaaacgcgcgagcctgccgacttggaggagcgacgcaaactaatgatggccgcagtgctcgttaccgtggagcttgagtgcatgcagcggttctttgctgacccggagatgcagcgcaagctagaggaaacattgcactacacctttcgacagggctacgtacgccaggcctgcaagatctccaacgtggagctctgcaacctggtctcctaccttggaattttgcacgaaaaccgccttgggcaaaacgtgcttcattccacgctcaagggcgaggcgcgccgcgactacgtccgcgactgcgtttacttatttctatgctacacctggcagacggccatgggcgtttggcagcagtgcttggaggagtgcaacctcaaggagctgcagaaactgctaaagcaaaacttgaaggacctatggacggccttcaacgagcgctccgtggccgcgcacctggcggacatcattttccccgaacgcctgcttaaaaccctgcaacagggtctgccagacttcaccagtcaaagcatgttgcagaactttaggaactttatcctagagcgctcaggaatcttgcccgccacctgctgtgcacttcctagcgactttgtgcccattaagtaccgcgaatgccctccgccgctttggggccactgctaccttctgcagctagccaactaccttgcctaccactctgacataatggaagacgtgagcggtgacggtctactggagtgtcactgtcgctgcaacctatgcaccccgcaccgctccctggtttgcaattcgcagctgcttaacgaaagtcaaattatcggtacctttgagctgcagggtccctcgcctgacgaaaagtccgcggctccggggttgaaactcactccggggctgtggacgtcggcttaccttcgcaaatttgtacctgaggactaccacgcccacgagattaggttctacgaagaccaatcccgcccgcctaatgcggagcttaccgcctgcgtcattacccagggccacattcttggccaattgcaagccatcaacaaagcccgccaagagtttctgctacgaaagggacggggggtttacttggacccccagtccggcgaggagctcaacccaatccccccgccgccgcagccctatcagcagcagccgcgggcccttgcttcccaggatggcacccaaaaagaagctgcagctgccgccgccacccacggacgaggaggaatactgggacagtcaggcagaggaggttttggacgaggaggaggaggacatgatggaagactgggagagcctagacgaggaagcttccgaggtcgaagaggtgtcagacgaaacaccgtcaccctcggtcgcattcccctcgccggcgccccagaaatcggcaaccggttccagcatggctacaacctccgctcctcaggcgccgccggcactgcccgttcgccgacccaaccgtagatgggacaccactggaaccagggccggtaagtccaagcagccgccgccgttagcccaagagcaacaacagcgccaaggctaccgctcatggcgcgggcacaagaacgccatagttgcttgcttgcaagactgtgggggcaacatctccttcgcccgccgctttcttctctaccatcacggcgtggccttcccccgtaacatcctgcattactaccgtcatctctacagcccatactgcaccggcggcagcggcagcaacagcagcggccacacagaagcaaaggcgaccggatagcaagactctgacaaagcccaagaaatccacagcggcggcagcagcaggaggaggagcgctgcgtctggcgcccaacgaacccgtatcgacccgcgagcttagaaacaggatttttcccactctgtatgctatatttcaacagagcaggggccaagaacaagagctgaaaataaaaaacaggtctctgcgatccctcacccgcagctgcctgtatcacaaaagcgaagatcagcttcggcgcacgctggaagacgcggaggctctcttcagtaaatactgcgcgctgactcttaaggactagtttcgcgccctttctcaaatttaagcgcgaaaactacgtcatctccagcggccacacccggcgccagcacctgttgtcagcgccattttttagggcggagtaacttgtatgtgttgggaattgtagttttcttaaaatgggaagtgacgtaacgtgggaaaacggaagtgacgatttgaggaagttgtgggttttttggctttcgtttctgggcgtaggttcgcgtgcggttttctgggtgttttttgtggactttaaccgttacgtcattttttagtcctatatatactcgctctgcacttggcccttttttacactgtgactgattgagctggtgccgtgtcgagtggtgtttttttaataggttttcttttttactggtaaggctgactgttatgactacgtccggcgttccatttggcatgacactacgaccaacacgatctcggttgtctcggcgcactccgtacagtagggatcgtctacctccttttgagacagaaacccgcgctaccatactggaggatcatccgctgctgcccgaatgtaacactttgacaatgcacaacgtgagttacgtgcgaggtcttccctgcagtgtgggatttacgctgattcaggaatgggttgttccctgggatatggttctaacgcgggaggagcttgtaatcctgaggaagtgtatgcacgtgtgcctgtgttgtgccaacattgatatcatgacgagcatgatgatccatggttacgagtcctgggctctccactgtcattgttccagtcccggttccctgcagtgtatagccggcgggcaggttttggccagctggtttaggatggtggtggatggcgccatgtttaatcagaggtttatatggtaccgggaggtggtgaattacaacatgccaaaagaggtaatgtttatgtccagcgtgtttatgaggggtcgccacttaatctacctgcgcttgtggtatgatggccacgtgggttctgtggtccccgccatgagctttggatacagcgccttgcactgtgggattttgaacaatattgtggtgctgtgctgcagttactgtgctgatttaagtgagatcagggtgcgctgctgtgcccggaggacaaggcgccttatgctgcgggcggtgcgaatcatcgctgaggagaccactgccatgttgtattcctgcaggacggagcggcggcggcagcagtttattcgcgcgctgctgcagcaccaccgccctatcctgatgcacgattatgactctacccccatgtaggcgtggacttctccttcgccgcccgttaagcaaccgcaagttggacagcagcctgtggctcagcagctggacagcgacatgaacttaagtgagctgcccggggagtttattaatatcactgatgagcgtttggctcgacaggaaaccgtgtggaatataacacctaagaatatgtctgttacccatgatatgatgctttttaaggccagccggggagaaaggactgtgtactctgtgtgttgggagggaggtggcaggttgaatactagggttctgtgagtttgattaaggtacggtgatctgtataagctatgtggtggtggggctatactactgaatgaaaaatgacttgaaattttctgcaattgaaaaataaacacgttgaaacataacacaaacgattctttattcttgggcaatgtatgaaaaagtgtaagaggatgtggcaaatatttcattaatgtagttgtggccagaccagtcccatgaaaatgacatagagtatgcacttggagttgtgtctcctgtttcctgtgtaccgtttagtgtaatggttagtgttacaggtttagttttgtctccgtttaagtaaacttgactgacaatgttacttttggcagttttaccgtgagattttggataagctgataggttaggcataaatccaacagcgtttgtataggctgtcgacattgattattgactagttattaatagtaatcaattacggggtcattagttcatagcccatatatggagttccgcgttacataacttacggtaaatggcccgcctggctgaccgcccaacgacccccgcccattgacgtcaataatgacgtatgttcccatagtaacgccaatagggactttccattgacgtcaatgggtggagtatttacggtaaactgcccacttggcagtacatcaagtgtatcatatgccaagtacgccccctattgacgtcaatgacggtaaatggcccgcctggcattatgcccagtacatgaccttatgggactttcctacttggcagtacatctacgtattagtcatcgctattaccatggtgatgcggttttggcagtacatcaatgggcgtggatagcggtttgactcacggggatttccaagtctccaccccattgacgtcaatgggagtttgttttggcaccaaaatcaacgggactttccaaaatgtcgtaacaactccgccccattgacgcaaatgggcggtaggcgtgtacggtgggaggtctatataagcagagctctctggctaactagagaacccactgcttactggcttatcgaaattaatacgactcactatagggagacccaagctgatgagacatattatctgccacggaggtgttattaccgaagaaatggccgccagtcttttggaccagctgatcgaagaggtactggctgataatcttccacctcctagccattttgaaccacctacccttcacgaactgtatgatttagacgtgacggcccccgaagatcccaacgaggaggcggtttcgcagatttttcccgactctgtaatgttggcggtgcaggaagggattgacttactcacttttccgccggcgcccggttctccggagccgcctcacctttcccggcagcccgagcagccggagcagagagccttgggtccggtttctatgccaaaccttgtaccggaggtgatcgatcttacctgccacgaggctggctttccacccagtgacgacgaggatgaagagggtgaggagtttgtgttagattatgtggagcaccccgggcacggttgcaggtcttgtcattatcaccggaggaatacgggggacccagatattatgtgttcgctttgctatatgaggacctgtggcatgtttgtctacagtaagtgaaaattatgggcagtgggtgatagagtggtgggtttggtgtggtaattttttttttaatttttacagttttgtggtttaaagaattttgtattgtgatttttttaaaaggtcctgtgtctgaacctgagcctgagcccgagccagaaccggagcctgcaagacctacccgccgtcctaaaatggcgcctgctatcctgagacgcccgacatcacctgtgtctagagaatgcaatagtagtacggatagctgtgactccggtccttctaacacacctcctgagatacacccggtggtcccgctgtgccccattaaaccagttgccgtgagagttggtgggcgtcgccaggctgtggaatgtatcgaggacttgcttaacgagcctgggcaacctttggacttgagctgtaaacgccccaggccataaaaacccgctgatcagcctcgactgtgccttctagttgccagccatctgttgtttgcccctcccccgtgccttccttgaccctggaaggtgccactcccactgtcctttcctaataaaatgaggaaattgcatcgcattgtctgagtaggtgtcattctattctggggggtggggtggggcaggacagcaagggggaggattgggaagacaatagcaggcatgctggggatgcggtgggctctatgggcccctcctgacgcggtaggaggaggggagggtgccctgcatgtctgccgctgctcttgctcttgccgctgctgaggaggggggcgcatctgccgcagcaccggatgcatctgggaaaagcaaaaaaggggctcgtccctgtttccggaggaatttgcaagcggggtcttgcatgacggggaggcaaacccccgttcgccgcagtccggccggtccgagactcgaaccgggggtcccgcgactcaacccttggaaaataaccctccggctacagggagcgagccacttaatgctttcgctttccagcctaaccgcttacgctgcgcgcggccagtggccaaaaaagctagcgcagcagccgccgcgcctggaaggaagccaaaaggagcactcccccgttgtctgacgtcgcacacctgggttcgacacgcgggcggtaaccgcatggatcacggcggacggccggatacggggctcgaaccccggtcgtccgccatgatacccttgcgaatttatccaccagaccacggaagagtgcccgcttacaggctctccttttgcacggtctagagcgtcaacgattgcgcgcgcctgaccggccagagcgtcccgaccatggagcactttttgccgctgcgcaacatctggaaccgcgtccgcgactttccgcgcgcctccaccaccgccgccggcatcacctggatgtccaggtacatctacggata

SEQ ID NO: 57 - DNA, 9294 bp, synthetic construct
  source 1..9294: mol_type = other DNA
aataaaggcaaatgcttttatttgtacactctcgggtgattatttacccccacccttgccgtctgcgccgtttaaaaatcaaaggggttctgccgcgcatcgctatgcgccactggcagggacacgttgcgatactggtgtttagtgctccacttaaactcaggcacaaccatccgcggcagctcggtgaagttttcactccacaggctgcgcaccatcaccaacgcgtttagcaggtcgggcgccgatatcttgaagtcgcagttggggcctccgccctgcgcgcgcgagttgcgatacacagggttgcagcactggaacactatcagcgccgggtggtgcacgctggccagcacgctcttgtcggagatcagatccgcgtccaggtcctccgcgttgctcagggcgaacggagtcaactttggtagctgccttcccaaaaagggcgcgtgcccaggctttgagttgcactcgcaccgtagtggcatcaaaaggtgaccgtgcccggtctgggcgttaggatacagcgcctgcataaaagccttgatctgcttaaaagccacctgagcctttgcgccttcagagaagaacatgccgcaagacttgccggaaaactgattggccggacaggccgcgtcgtgcacgcagcaccttgcgtcggtgttggagatctgcaccacatttcggccccaccggttcttcacgatcttggccttgctagactgctccttcagcgcgcgctgcccgttttcgctcgtcacatccatttcaatcacgtgctccttatttatcataatgcttccgtgtagacacttaagctcgccttcgatctcagcgcagcggtgcagccacaacgcgcagcccgtgggctcgtgatgcttgtaggtcacctctgcaaacgactgcaggtacgcctgcaggaatcgccccatcatcgtcacaaaggtcttgttgctggtgaaggtcagctgcaacccgcggtgctcctcgttcagccaggtcttgcatacggccgccagagcttccacttggtcaggcagtagtttgaagttcgcctttagatcgttatccacgtggtacttgtccatcagcgcgcgcgcagcctccatgcccttctcccacgcagacacgatcggcacactcagcgggttcatcaccgtaatttcactttccgcttcgctgggctcttcctcttcctcttgcgtccgcataccacgcgccactgggtcgtcttcattcagccgccgcactgtgcgcttacctcctttgccatgcttgattagcaccggtgggttgctgaaacccaccatttgtagcgccacatcttctctttcttcctcgctgtccacgattacctctggtgatggcgggcgctcgggcttgggagaagggcgcttctttttcttcttgggcgcaatggccaaatccgccgccgaggtcgatggccgcgggctgggtgtgcgcggcaccagcgcgtcttgtgatgagtcttcctcgtcctcggactcgatacgccgcctcatccgcttttttgggggcgcccggggaggcggcggcgacggggacggggacgacacgtcctccatggttgggggacgtcgcgccgcaccgcgtccgcgctcgggggtggtttcgcgctgctcctcttcccgactggccatttccttctcctataggcagaaaaagatcatggagtcagtcgagaagaaggacagcctaaccgccccctctgagttcgccaccaccgcctccaccgatgccgccaacgcgcctaccaccttccccgtcgaggcacccccgcttgaggaggaggaagtgattatcgagcaggacccaggttttgtaagcgaagacgacgaggaccgctcagtaccaacagaggataaaaagcaagaccaggacaacgcagaggcaaacgaggaacaagtcgggcggggggacgaaaggcatggcgactacctagatgtgggagacgacgtgctgttgaagcatctgcagcgccagtgcgccattatctgcgacgcgttgcaagagcgcagcgatgtgcccctcgccatagcggatgtcagccttgcctacgaacgccacctattctcaccgcgcgtaccccccaaacgccaagaaaacggcacatgcgagcccaacccgcgcctcaacttctaccccgtatttgccgtgccagaggtgcttgccacctatcacatctttttccaaaactgcaagatacccctatcctgccgtgccaaccgcagccgagcggacaagcagctggccttgcggcagggcgctgtcatacctgatatcgcctcgctcaacgaagtgccaaaaatctttgagggtcttggacgcgacgagaagcgcgcggcaaacgctctgcaacaggaaaacagcgaaaatgaaagtcactctggagtgttggtggaactcgagggtgacaacgcgcgcctagccgtactaaaacgcagcatcgaggtcacccactttgcctacccggcacttaacctaccccccaaggtcatgagcacagtcatgagtgagctgatcgtgcgccgtgcgcagcccctggagagggatgcaaatttgcaagaacaaacagaggagggcctacccgcagttggcgacgagcagctagcgcgctggcttcaaacgcgcgagcctgccgacttggaggagcgacgcaaactaatgatggccgcagtgctcgttaccgtggagcttgagtgcatgcagcggttctttgctgacccggagatgcagcgcaagctagaggaaacattgcactacacctttcgacagggctacgtacgccaggcctgcaagatctccaacgtggagctctgcaacctggtctcctaccttggaattttgcacgaaaaccgccttgggcaaaacgtgcttcattccacgctcaagggcgaggcgcgccgcgactacgtccgcgactgcgtttacttatttctatgctacacctggcagacggccatgggcgtttggcagcagtgcttggaggagtgcaacctcaaggagctgcagaaactgctaaagcaaaacttgaaggacctatggacggccttcaacgagcgctccgtggccgcgcacctggcggacatcattttccccgaacgcctgcttaaaaccctgcaacagggtctgccagacttcaccagtcaaagcatgttgcagaactttaggaactttatcctagagcgctcaggaatcttgcccgccacctgctgtgcacttcctagcgactttgtgcccattaagtaccgcgaatgccctccgccgctttggggccactgctaccttctgcagctagccaactaccttgcctaccactctgacataatggaagacgtgagcggtgacggtctactggagtgtcactgtcgctgcaacctatgcaccccgcaccgctccctggtttgcaattcgcagctgcttaacgaaagtcaaattatcggtacctttgagctgcagggtccctcgcctgacgaaaagtccgcggctccggggttgaaactcactccggggctgtggacgtcggcttaccttcgcaaatttgtacctgaggactaccacgcccacgagattaggttctacgaagaccaatcccgcccgcctaatgcggagcttaccgcctgcgtcattacccagggccacattcttggccaattgcaagccatcaacaaagcccgccaagagtttctgctacgaaagggacggggggtttacttggacccccagtccggcgaggagctcaacccaatccccccgccgccgcagccctatcagcagcagccgcgggcccttgcttcccaggatggcacccaaaaagaagctgcagctgccgccgccacccacggacgaggaggaatactgggacagtcaggcagaggaggttttggacgaggaggaggaggacatgatggaagactgggagagcctagacgaggaagcttccgaggtcgaagaggtgtcagacgaaacaccgtcaccctcggtcgcattcccctcgccggcgccccagaaatcggcaaccggttccagcatggctacaacctccgctcctcaggcgccgccggcactgcccgttcgccgacccaaccgtagatgggacaccactggaaccagggccggtaagtccaagcagccgccgccgttagcccaagagcaacaacagcgccaaggctaccgctcatggcgcgggcacaagaacgccatagttgcttgcttgcaagactgtgggggcaacatctccttcgcccgccgctttcttctctaccatcacggcgtggccttcccccgtaacatcctgcattactaccgtcatctctacagcccatactgcaccggcggcagcggcagcaacagcagcggccacacagaagcaaaggcgaccggatagcaagactctgacaaagcccaagaaatccacagcggcggcagcagcaggaggaggagcgctgcgtctggcgcccaacgaacccgtatcgacccgcgagcttagaaacaggatttttcccactctgtatgctatatttcaacagagcaggggccaagaacaagagctgaaaataaaaaacaggtctctgcgatccctcacccgcagctgcctgtatcacaaaagcgaagatcagcttcggcgcacgctggaagacgcggaggctctcttcagtaaatactgcgcgctgactcttaaggactagtttcgcgccctttctcaaatttaagcgcgaaaactacgtcatctccagcggccacacccggcgccagcacctgttgtcagcgccattttttagggcggagtaacttgtatgtgttgggaattgtagttttcttaaaatgggaagtgacgtaacgtgggaaaacggaagtgacgatttgaggaagttgtgggttttttggctttcgtttctgggcgtaggttcgcgtgcggttttctgggtgttttttgtggactttaaccgttacgtcattttttagtcctatatatactcgctctgcacttggcccttttttacactgtgactgattgagctggtgccgtgtcgagtggtgtttttttaataggttttcttttttactggtaaggctgactgttatgactacgtccggcgttccatttggcatgacactacgaccaacacgatctcggttgtctcggcgcactccgtacagtagggatcgtctacctccttttgagacagaaacccgcgctaccatactggaggatcatccgctgctgcccgaatgtaacactttgacaatgcacaacgtgagttacgtgcgaggtcttccctgcagtgtgggatttacgctgattcaggaatgggttgttccctgggatatggttctaacgcgggaggagcttgtaatcctgaggaagtgtatgcacgtgtgcctgtgttgtgccaacattgatatcatgacgagcatgatgatccatggttacgagtcctgggctctccactgtcattgttccagtcccggttccctgcagtgtatagccggcgggcaggttttggccagctggtttaggatggtggtggatggcgccatgtttaatcagaggtttatatggtaccgggaggtggtgaattacaacatgccaaaagaggtaatgtttatgtccagcgtgtttatgaggggtcgccacttaatctacctgcgcttgtggtatgatggccacgtgggttctgtggtccccgccatgagctttggatacagcgccttgcactgtgggattttgaacaatattgtggtgctgtgctgcagttactgtgctgatttaagtgagatcagggtgcgctgctgtgcccggaggacaaggcgccttatgctgcgggcggtgcgaatcatcgctgaggagaccactgccatgttgtattcctgcaggacggagcggcggcggcagcagtttattcgcgcgctgctgcagcaccaccgccctatcctgatgcacgattatgactctacccccatgtaggcgtggacttctccttcgccgcccgttaagcaaccgcaagttggacagcagcctgtggctcagcagctggacagcgacatgaacttaagtgagctgcccggggagtttattaatatcactgatgagcgtttggctcgacaggaaaccgtgtggaatataacacctaagaatatgtctgttacccatgatatgatgctttttaaggccagccggggagaaaggactgtgtactctgtgtgttgggagggaggtggcaggttgaatactagggttctgtgagtttgattaaggtacggtgatctgtataagctatgtggtggtggggctatactactgaatgaaaaatgacttgaaattttctgcaattgaaaaataaacacgttgaaacataacacaaacgattctttattcttgggcaatgtatgaaaaagtgtaagaggatgtggcaaatatttcattaatgtagttgtggccagaccagtcccatgaaaatgacatagagtatgcacttggagttgtgtctcctgtttcctgtgtaccgtttagtgtaatggttagtgttacaggtttagttttgtctccgtttaagtaaacttgactgacaatgttacttttggcagttttaccgtgagattttggataagctgataggttaggcataaatccaacagcgtttgtataggctgtcgacattgattattgactagttattaatagtaatcaattacggggtcattagttcatagcccatatatggagttccgcgttacataacttacggtaaatggcccgcctggctgaccgcccaacgacccccgcccattgacgtcaataatgacgtatgttcccatagtaacgccaatagggactttccattgacgtcaatgggtggagtatttacggtaaactgcccacttggcagtacatcaagtgtatcatatgccaagtacgccccctattgacgtcaatgacggtaaatggcccgcctggcattatgcccagtacatgaccttatgggactttcctacttggcagtacatctacgtattagtcatcgctattaccatggtgatgcggttttggcagtacatcaatgggcgtggatagcggtttgactcacggggatttccaagtctccaccccattgacgtcaatgggagtttgttttggcaccaaaatcaacgggactttccaaaatgtcgtaacaactccgccccattgacgcaaatgggcggtaggcgtgtacggtgggaggtctatataagcagagctctctggctaactagagaacccactgcttactggcttatcgaaattaatacgactcactatagggagacccaagctgatgagacatattatctgccacggaggtgttattaccgaagaaatggccgccagtcttttggaccagctgatcgaagaggtactggctgataatcttccacctcctagccattttgaaccacctacccttcacgaactgtatgatttagacgtgacggcccccgaagatcccaacgaggaggcggtttcgcagatttttcccgactctgtaatgttggcggtgcaggaagggattgacttactcacttttccgccggcgcccggttctccggagccgcctcacctttcccggcagcccgagcagccggagcagagagccttgggtccggtttctatgccaaaccttgtaccggaggtgatcgatcttacctgccacgaggctggctttccacccagtgacgacgaggatgaagagggtgaggagtttgtgttagattatgtggagcaccccgggcacggttgcaggtcttgtcattatcaccggaggaatacgggggacccagatattatgtgttcgctttgctatatgaggacctgtggcatgtttgtctacagtaagtgaaaattatgggcagtgggtgatagagtggtgggtttggtgtggtaattttttttttaatttttacagttttgtggtttaaagaattttgtattgtgatttttttaaaaggtcctgtgtctgaacctgagcctgagcccgagccagaaccggagcctgcaagacctacccgccgtcctaaaatggcgcctgctatcctgagacgcccgacatcacctgtgtctagagaatgcaatagtagtacggatagctgtgactccggtccttctaacacacctcctgagatacacccggtggtcccgctgtgccccattaaaccagttgccgtgagagttggtgggcgtcgccaggctgtggaatgtatcgaggacttgcttaacgagcctgggcaacctttggacttgagctgtaaacgccccaggccataaaaacccgctgatcagcctcgactgtgccttctagttgccagccatctgttgtttgcccctcccccgtgccttccttgaccctggaaggtgccactcccactgtcctttcctaataaaatgaggaaattgcatcgcattgtctgagtaggtgtcattctattctggggggtggggtggggcaggacagcaagggggaggattgggaagacaatagcaggcatgctggggatgcggtgggctctatgggcccctcctgacgcggtaggaggaggggagggtgccctgcatgtctgccgctgctcttgctcttgccgctgctgaggaggggggcgcatctgccgcagcaccggatgcatctgggaaaagcaaaaaaggggctcgtccctgtttccggaggaatttgcaagcggggtcttgcatgacggggaggcaaacccccgttcgccgcagtccggccggtccgagactcgaaccgggggtcccgcgactcaacccttggaaaataaccctccggctacagggagcgagccacttaatgctttcgctttccagcctaaccgcttacgctgcgcgcggccagtggccaaaaaagctagcgcagcagccgccgcgcctggaaggaagccaaaaggagcactcccccgttgtctgacgtcgcacacctgggttcgacacgcgggcggtaaccgcatggatcacggcggacggccggatacggggctcgaaccccggtcgtccgccatgatacccttgcgaatttatccaccagaccacggaagagtgcccgcttacaggctctccttttgcacggtctagagcgtcaacgattgcgcgcgcctgaccggccagagcgtcccgaccatggagcactttttgccgctgcgcaacatctggaaccgcgtccgcgactttccgcgcgcctccaccaccgccgccggcatcacctggatgtccaggtacatctacggata

SEQ ID NO: 58-59 - skipped (2 entries)

SEQ ID NO: 60 - DNA, 1590 bp, synthetic construct
  source 1..1590: mol_type = other DNA
atggcctctagagaggaagaacagcgcgagacaacaccagagagaggcagaggcgctgctcgcagacctccaaccatggaagatgtgtcgtcccctagccctagccctccccctccgcgggccccccctaagaagagaatgcggagacggatcgagagcgaggatgaggaggacagcagccaggacgccctcgtgcctagaacccctagtcctcggccctctacaagcgccgctgatctggctatcgcccctaagaagaaaaaaaaacggcctagcccaaagcctgaacggccccccagcccagaagtgatcgtggatagcgaagaagaaagggaggacgtcgccctccagatggtgggcttctctaatcctcctgtactgattaagcacggaaagggaggaaaaagaaccgtgcggagactgaatgaggacgaccccgtggctcggggcatgagaacacaggaggaagaggaggaaccttcagaagctgaaagcgagatcaccgtgatgaaccccctgagcgtgcccatcgtttccgcctgggagaagggcatggaagccgccagagcactgatggataagtatcacgtggacaacgacctgaaggctaatttcaagctgctgccagatcaggtcgaggctctggccgccgtgtgcaagacatggctgaacgaggaacacagaggactgcagctgacttttacctccaacaagaccttcgtgaccatgatgggcagattcctgcaagcctacctgcaatcttttgctgaggtgacatacaagcaccacgagcctaccggttgtgccctgtggctgcacagatgcgcggaaatcgagggcgagctgaagtgtctgcacggcagcatcatgatcaacaaggaacatgtgatcgagatggacgtcacctctgagaacggccagagggccctgaaagagcagagcagcaaggccaagatcgtgaagaacagatggggcagaaacgtggtgcagatcagcaataccgacgcccggtgttgtgtgcacgacgccgcctgccccgccaaccagttcagcggcaaaagctgcggcatgttcttctccgaaggcgccaaggcccaagtggccttcaaacagatcaaggcctttatgcaggccctgtaccccaacgcccagaccggccacggccacctgctgatgcctctgagatgcgagtgcaatagcaagcccggccacgcccctttcctgggccgccagctgcccaagctgaccccttttgccttgtctaacgccgaggatctcgacgccgacctgatcagcgacaagtctgtgctggccagcgtgcaccaccctgctcttattgtgttccagtgctgcaaccctgtgtacagaaacagcagagcccagggcggcggacctaactgcgacttcaaaatcagcgcccctgacctgctgaacgccctggtgatggtgcggagcctgtggagcgagaacttcacagagctgcctagaatggtcgtgcctgagttcaagtggtccaccaagcaccagtaccggaacgtgtctctgcccgtggcccattccgatgccagacagaaccccttcgacttctga

SEQ ID NO: 61 - DNA, 1164 bp, synthetic construct
  source 1..1164: mol_type = other DNA
atgacaacctccggcgtgcctttcggcatgaccctgagacctaccagatctcggctgagcagacggaccccttacagccgggacagactgcctccattcgagacagaaacaagagccaccatcctggaagatcaccccctgctgcccgagtgcaacaccctgaccatgcacaacgtgagttacgtgcgaggtcttccctgcagtgtgggatttacgctgattcaggaatgggtcgtgccatgggatatggttctcaccagagaggaactggtgatcctgagaaagtgcatgcacgtgtgcctgtgttgcgccaatatcgacatcatgaccagcatgatgatccacggctacgagagctgggcccttcattgccactgtagcagccctggctctctgcagtgcatcgccggcggccaggtgctggccagctggttcagaatggtggtcgacggcgccatgttcaaccagagattcatctggtatcgcgaggtggtgaactacaacatgcctaaggaagtgatgtttatgtcctctgtgttcatgagaggaagacacctgatctacctgcggctgtggtacgacggacacgtgggcagcgtggtgcccgccatgagcttcggctacagcgccctgcactgcggcatcctgaacaacattgtggtgctgtgctgctcctactgcgctgatctgagcgagatcagagtgcggtgctgtgctagacggacccggagactgatgctgagagccgtgcggatcatcgctgaagagacaacagccatgctgtactcttgtagaaccgagagaaggcggcagcagtttatccgggccctgctgcaacaccacagacctatcctgatgcacgattatgactctacccccatgtaggcgtggacttctccttcgccacctgtgaaacagccccaggtgggccagcaacctgtcgcccagcagctggacagcgacatgaacctgagcgagctgcccggcgagttcatcaacatcacagatgagcggctggctagacaggagacagtgtggaatatcacccctaagaacatgagcgtgacccacgacatgatgctgttcaaggcctctagaggcgaacggaccgtgtactccgtgtgctgggaaggcggcggaagactgaacaccagagtgctgtga

SEQ ID NO: 62 - DNA, 133 bp, synthetic construct
  source 1..133: mol_type = other DNA
aggtcctgtattagaggtcacgtgagtgttttgcgacattttgcgacaccatgtggtcacgctgggtatttaagcccgagtgagcacgcagggtctccattttgaagcgggaggtttgaacgcgcagccgcca

SEQ ID NO: 63 - DNA, 1866 bp, synthetic construct
  source 1..1866: mol_type = other DNA
atgccggggttttacgagattgtgattaaggtccccagcgaccttgacgagcatctgcccggcatttctgacagctttgtgaactgggtggccgagaaggaatgggagttgccgccagattctgacatggatctgaatctgattgagcaggcacccctgaccgtggccgagaagctgcagcgcgactttctgacggaatggcgccgtgtgagtaaggccccggaggctcttttctttgtgcaatttgagaagggagagagctacttccacatgcacgtgctcgtggaaaccaccggggtgaaatccatggttttgggacgtttcctgagtcagattcgcgaaaaactgattcagagaatttaccgcgggatcgagccgactttgccaaactggttcgcggtcacaaagaccagaaatggcgccggaggcgggaacaaggtggtggatgagtgctacatccccaattacttgctccccaaaacccagcctgagctccagtgggcgtggactaatatggaacagtatttaagcgcctgtttgaatctcacggagcgtaaacggttggtggcgcagcatctgacgcacgtgtcgcagacgcaggagcagaacaaagagaatcagaatcccaattctgatgcgccggtgatcagatcaaaaacttcagccaggtacatggagctggtcgggtggctcgtggacaaggggattacctcggagaagcagtggatccaggaggaccaggcctcatacatctccttcaatgcggcctccaactcgcggtcccaaatcaaggctgccttggacaatgcgggaaagattatgagcctgactaaaaccgcccccgactacctggtgggccagcagcccgtggaggacatttccagcaatcggatttataaaattttggaactaaacgggtacgatccccaatatgcggcttccgtctttctgggatgggccacgaaaaagttcggcaagaggaacaccatctggctgtttgggcctgcaactaccgggaagaccaacatcgcggaggccatagcccacactgtgcccttctacgggtgcgtaaactggaccaatgagaactttcccttcaacgactgtgtcgacaagatggtgatctggtgggaggaggggaagatgaccgccaaggtcgtggagtcggccaaagccattctcggaggaagcaaggtgcgcgtggaccagaaatgcaagtcctcggcccagatagacccgactcccgtgatcgtcacctccaacaccaacatgtgcgccgtgattgacgggaactcaacgaccttcgaacaccagcagccgttgcaagaccggatgttcaaatttgaactcacccgccgtctggatcatgactttgggaaggtcaccaagcaggaagtcaaagactttttccggtgggcaaaggatcacgtggttgaggtggagcatgaattctacgtcaaaaagggtggagccaagaaaagacccgcccccagtgacgcagatataagtgagcccaaacgggtgcgcgagtcagttgcgcagccatcgacgtcagacgcggaagcttcgatcaactacgcagacaggtaccaaaacaaatgttctcgtcacgtgggcatgaatctgatgctgtttccctgcagacaatgcgagagaatgaatcagaattcaaatatctgcttcactcacggacagaaagactgtttagagtgctttcccgtgtcagaatctcaacccgtttctgtcgtcaaaaaggcgtatcagaaactgtgctacattcatcatatcatgggaaaggtgccagacgcttgcactgcctgcgatctggtcaatgtggatttggatgactgcatctttgaacaataa

SEQ ID NO: 64 - DNA, 2208 bp, synthetic construct
  source 1..2208: mol_type = other DNA
atggctgccgatggttatcttccagattggctcgaggacactctctctgaaggaataagacagtggtggaagctcaaacctggcccaccaccaccaaagcccgcagagcggcataaggacgacagcaggggtcttgtgcttcctgggtacaagtacctcggacccttcaacggactcgacaagggagagccggtcaacgaggcagacgccgcggccctcgagcacgacaaagcctacgaccggcagctcgacagcggagacaacccgtacctcaagtacaaccacgccgacgcggagtttcaggagcgccttaaagaagatacgtcttttgggggcaacctcggacgagcagtcttccaggcgaaaaagagggttcttgaacctctgggcctggttgaggaacctgttaagacggctccgggaaaaaagaggccggtagagcactctcctgtggagccagactcctcctcgggaaccggaaaggcgggccagcagcctgcaagaaaaagattgaattttggtcagactggagacgcagactcagtacctgacccccagcctctcggacagccaccagcagccccctctggtctgggaactaatacgatggctacaggcagtggcgcaccaatggcagacaataacgagggcgccgacggagtgggtaattcctcgggaaattggcattgcgattccacatggatgggcgacagagtcatcaccaccagcacccgaacctgggccctgcccacctacaacaaccacctctacaaacaaatttccagccaatcaggagcctcgaacgacaatcactactttggctacagcaccccttgggggtattttgacttcaacagattccactgccacttttcaccacgtgactggcaaagactcatcaacaacaactggggattccgacccaagagactcaacttcaagctctttaacattcaagtcaaagaggtcacgcagaatgacggtacgacgacgattgccaataaccttaccagcacggttcaggtgtttactgactcggagtaccagctcccgtacgtcctcggctcggcgcatcaaggatgcctcccgccgttcccagcagacgtcttcatggtgccacagtatggatacctcaccctgaacaacgggagtcaggcagtaggacgctcttcattttactgcctggagtactttccttctcagatgctgcgtaccggaaacaactttaccttcagctacacttttgaggacgttcctttccacagcagctacgctcacagccagagtctggaccgtctcatgaatcctctcatcgaccagtacctgtattacttgagcagaacaaacactccaagtggaaccaccacgcagtcaaggcttcagttttctcaggccggagcgagtgacattcgggaccagtctaggaactggcttcctggaccctgttaccgccagcagcgagtatcaaagacatctgcggataacaacaacagtgaatactcgtggactggagctaccaagtaccacctcaatggcagagactctctggtgaatccgggcccggccatggcaagccacaaggacgatgaagaaaagttttttcctcagagcggggttctcatctttgggaagcaaggctcagagaaaacaaatgtggacattgaaaaggtcatgattacagacgaagaggaaatcaggacaaccaatcccgtggctacggagcagtatggttctgtatctaccaacctccagagaggcaacagacaagcagctaccgcagatgtcaacacacaaggcgttcttccaggcatggtctggcaggacagagatgtgtaccttcaggggcccatctgggcaaagattccacacacggacggacattttcacccctctcccctcatgggtggattcggacttaaacaccctcctccacagattctcatcaagaacaccccggtacctgcgaatccttcgaccaccttcagtgcggcaaagtttgcttccttcatcacacagtactccacgggacaggtcagcgtggagatcgagtgggagctgcagaaggaaaacagcaaacgctggaatcccgaaattcagtacacttccaactacaacaagtctgttaatgtggactttactgtggacactaatggcgtgtattcagagcctcgccccattggcaccagatacctgactcgtaatctgtaa

SEQ ID NO: 65 - DNA, 2211 bp, synthetic construct
  source 1..2211: mol_type = other DNA
atggctgccgatggttatcttccagattggctcgaggacaacctctctgagggcattcgcgagtggtgggacttgaaacctggagccccgaaacccaaagccaaccagcaaaagcaggacgacggccggggtctggtgcttcctggctacaagtacctcggacccttcaacggactcgacaagggggagcccgtcaacgcggcggatgcagcggccctcgagcacgacaaggcctacgaccagcagctcaaagcgggtgacaatccgtacctgcggtataaccacgccgacgccgagtttcaggagcgtctgcaagaagatacgtcttttgggggcaacctcgggcgagcagtcttccaggccaagaagagggttctcgaaccttttggtctggttgaggaaggtgctaagacggctcctggaaagaaacgtccggtagagcagtcgccacaagagccagactcctcctcgggcattggcaagacaggccagcagcccgctaaaaagagactcaattttggtcagactggcgactcagagtcagtccccgacccacaacctctcggagaacctccagcaacccccgctgctgtgggacctactacaatggcttcaggcggtggcgcaccaatggcagacaataacgaaggcgccgacggagtgggtaatgcctcaggaaattggcattgcgattccacatggctgggcgacagagtcatcaccaccagcacccgaacatgggccttgcccacctataacaaccacctctacaagcaaatctccagtgcttcaacgggggccagcaacgacaaccactacttcggctacagcaccccctgggggtattttgatttcaacagattccactgccatttctcaccacgtgactggcagcgactcatcaacaacaattggggattccggcccaagagactcaacttcaagctcttcaacatccaagtcaaggaggtcacgacgaatgatggcgtcacgaccatcgctaataaccttaccagcacggttcaagtcttctcggactcggagtaccagttgccgtacgtcctcggctctgcgcaccagggctgcctccctccgttcccggcggacgtgttcatgattccgcagtacggctacctaacgctcaacaatggcagccaggcagtgggacggtcatccttttactgcctggaatatttcccatcgcagatgctgagaacgggcaataactttaccttcagctacaccttcgaggacgtgcctttccacagcagctacgcgcacagccagagcctggaccggctgatgaatcctctcatcgaccagtacctgtattacctgaacagaactcagaatcagtccggaagtgcccaaaacaaggacttgctgtttagccgggggtctccagctggcatgtctgttcagcccaaaaactggctacctggaccctgttaccggcagcagcgcgtttctaaaacaaaaacagacaacaacaacagcaactttacctggactggtgcttcaaaatataaccttaatgggcgtgaatctataatcaaccctggcactgctatggcctcacacaaagacgacaaagacaagttctttcccatgagcggtgtcatgatttttggaaaggagagcgccggagcttcaaacactgcattggacaatgtcatgatcacagacgaagaggaaatcaaagccactaaccccgtggccaccgaaagatttgggactgtggcagtcaatctccagagcagcagcacagaccctgcgaccggagatgtgcatgttatgggagccttacctggaatggtgtggcaagacagagacgtatacctgcagggtcctatttgggccaaaattcctcacacggatggacactttcacccgtctcctctcatgggcggctttggacttaagcacccgcctcctcagatcctcatcaaaaacacgcctgttcctgcgaatcctccggcagagttttcggctacaaagtttgcttcattcatcacccagtattccacaggacaagtgagcgtggagattgaatgggagctgcagaaagaaaacagcaaacgctggaatcccgaagtgcagtatacatctaactatgcaaaatctgccaacgttgatttcactgtggacaacaatggactttatactgagcctcgccccattggcacccgttacctcacccgtcccctgtaa

SEQ ID NO: 66 - DNA, 2217 bp, synthetic construct
  source 1..2217: mol_type = other DNA
atggctgccgatggttatcttccagattggctcgaggacaacctctctgagggcattcgcgagtggtgggcgctgaaacctggagccccgaagcccaaagccaaccagcaaaagcaggacgacggccggggtctggtgcttcctggctacaagtacctcggacccttcaacggactcgacaagggggagcccgtcaacgcggcggacgcagcggccctcgagcacgacaaggcctacgaccagcagctgcaggcgggtgacaatccgtacctgcggtataaccacgccgacgccgagtttcaggagcgtctgcaagaagatacgtcttttgggggcaacctcgggcgagcagtcttccaggccaagaagcgggttctcgaacctctcggtctggttgaggaaggcgctaagacggctcctggaaagaagagaccggtagagccatcaccccagcgttctccagactcctctacgggcatcggcaagaaaggccaacagcccgccagaaaaagactcaattttggtcagactggcgactcagagtcagttccagaccctcaacctctcggagaacctccagcagcgccctctggtgtgggacctaatacaatggctgcaggcggtggcgcaccaatggcagacaataacgaaggcgccgacggagtgggtagttcctcgggaaattggcattgcgattccacatggctgggcgacagagtcatcaccaccagcacccgaacctgggccctgcccacctacaacaaccacctctacaagcaaatctccaacgggacatcgggaggagccaccaacgacaacacctacttcggctacagcaccccctgggggtattttgactttaacagattccactgccacttttcaccacgtgactggcagcgactcatcaacaacaactggggattccggcccaagagactcagcttcaagctcttcaacatccaggtcaaggaggtcacgcagaatgaaggcaccaagaccatcgccaataacctcaccagcaccatccaggtgtttacggactcggagtaccagctgccgtacgttctcggctctgcccaccagggctgcctgcctccgttcccggcggacgtgttcatgattccccagtacggctacctaacactcaacaacggtagtcaggccgtgggacgctcctccttctactgcctggaatactttccttcgcagatgctgagaaccggcaacaacttccagtttacttacaccttcgaggacgtgcctttccacagcagctacgcccacagccagagcttggaccggctgatgaatcctctgattgaccagtacctgtactacttgtctcggactcaaacaacaggaggcacggcaaatacgcagactctgggcttcagccaaggtgggcctaatacaatggccaatcaggcaaagaactggctgccaggaccctgttaccgccaacaacgcgtctcaacgacaaccgggcaaaacaacaatagcaactttgcctggactgctgggaccaaataccatctgaatggaagaaattcattggctaatcctggcatcgctatggcaacacacaaagacgacgaggagcgtttttttcccagtaacgggatcctgatttttggcaaacaaaatgctgccagagacaatgcggattacagcgatgtcatgctcaccagcgaggaagaaatcaaaaccactaaccctgtggctacagaggaatacggtatcgtggcagataacttgcagcagcaaaacacggctcctcaaattggaactgtcaacagccagggggccttacccggtatggtctggcagaaccgggacgtgtacctgcagggtcccatctgggccaagattcctcacacggacggcaacttccacccgtctccgctgatgggcggctttggcctgaaacatcctccgcctcagatcctgatcaagaacacgcctgtacctgcggatcctccgaccaccttcaaccagtcaaagctgaactctttcatcacgcaatacagcaccggacaggtcagcgtggaaattgaatgggagctgcagaaggaaaacagcaagcgctggaaccccgagatccagtacacctccaactactacaaatctacaagtgtggactttgctgttaatacagaaggcgtgtactctgaaccccgccccattggcacccgttacctcacccgtaatctgtaa

SEQ ID NO: 67 - DNA, 2211 bp, synthetic construct
  source 1..2211: mol_type = other DNA
atggctgccgatggttatcttccagattggctcgaggacaaccttagtgaaggaattcgcgagtggtgggctttgaaacctggagcccctcaacccaaggcaaatcaacaacatcaagacaacgctcgaggtcttgtgcttccgggttacaaataccttggacccggcaacggactcgacaagggggagccggtcaacgcagcagacgcggcggccctcgagcacgacaaggcctacgaccagcagctcaaggccggagacaacccgtacctcaagtacaaccacgccgacgccgagttccaggagcggctcaaagaagatacgtcttttgggggcaacctcgggcgagcagtcttccaggccaaaaagaggcttcttgaacctcttggtctggttgaggaagcggctaagacggctcctggaaagaagaggcctgtagagcagtctcctcaggaaccggactcctccgcgggtattggcaaatcgggtgcacagcccgctaaaaagagactcaatttcggtcagactggcgacacagagtcagtcccagaccctcaaccaatcggagaacctcccgcagccccctcaggtgtgggatctcttacaatggcttcaggtggtggcgcaccagtggcagacaataacgaaggtgccgatggagtgggtagttcctcgggaaattggcattgcgattcccaatggctgggggacagagtcatcaccaccagcacccgaacctgggccctgcccacctacaacaatcacctctacaagcaaatctccaacagcacatctggaggatcttcaaatgacaacgcctacttcggctacagcaccccctgggggtattttgacttcaacagattccactgccacttctcaccacgtgactggcagcgactcatcaacaacaactggggattccggcctaagcgactcaacttcaagctcttcaacattcaggtcaaagaggttacggacaacaatggagtcaagaccatcgccaataaccttaccagcacggtccaggtcttcacggactcagactatcagctcccgtacgtgctcgggtcggctcacgagggctgcctcccgccgttcccagcggacgttttcatgattcctcagtacgggtatctgacgcttaatgatggaagccaggccgtgggtcgttcgtccttttactgcctggaatatttcccgtcgcaaatgctaagaacgggtaacaacttccagttcagctacgagtttgagaacgtacctttccatagcagctacgctcacagccaaagcctggaccgactaatgaatccactcatcgaccaatacttgtactatctctcaaagactattaacggttctggacagaatcaacaaacgctaaaattcagtgtggccggacccagcaacatggctgtccagggaagaaactacatacctggacccagctaccgacaacaacgtgtctcaaccactgtgactcaaaacaacaacagcgaatttgcttggcctggagcttcttcttgggctctcaatggacgtaatagcttgatgaatcctggacctgctatggccagccacaaagaaggagaggaccgtttctttcctttgtctggatctttaatttttggcaaacaaggaactggaagagacaacgtggatgcggacaaagtcatgataaccaacgaagaagaaattaaaactactaacccggtagcaacggagtcctatggacaagtggccacaaaccaccagagtgcccaagcacaggcgcagaccggctgggttcaaaaccaaggaatacttccgggtatggtttggcaggacagagatgtgtacctgcaaggacccatttgggccaaaattcctcacacggacggcaactttcacccttctccgctgatgggagggtttggaatgaagcacccgcctcctcagatcctcatcaaaaacacacctgtacctgcggatcctccaacggccttcaacaaggacaagctgaactctttcatcacccagtattctactggccaagtcagcgtggagatcgagtgggagctgcagaaggaaaacagcaagcgctggaacccggagatccagtacacttccaactattacaagtctaataatgttgaatttgctgttaatactgaaggtgtatatagtgaaccccgccccattggcaccagatacctgactcgtaatctgtaa

SEQ ID NO: 68 - DNA, 4090 bp, synthetic construct
  source 1..4090: mol_type = other DNA
atgccggggttttacgagattgtgattaaggtccccagcgaccttgacgagcatctgcccggcatttctgacagctttgtgaactgggtggccgagaaggaatgggagttgccgccagattctgacatggatctgaatctgattgagcaggcacccctgaccgtggccgagaagctgcagcgcgactttctgacggaatggcgccgtgtgagtaaggccccggaggctcttttctttgtgcaatttgagaagggagagagctacttccacatgcacgtgctcgtggaaaccaccggggtgaaatccatggttttgggacgtttcctgagtcagattcgcgaaaaactgattcagagaatttaccgcgggatcgagccgactttgccaaactggttcgcggtcacaaagaccagaaatggcgccggaggcgggaacaaggtggtggatgagtgctacatccccaattacttgctccccaaaacccagcctgagctccagtgggcgtggactaatatggaacagtatttaagcgcctgtttgaatctcacggagcgtaaacggttggtggcgcagcatctgacgcacgtgtcgcagacgcaggagcagaacaaagagaatcagaatcccaattctgatgcgccggtgatcagatcaaaaacttcagccaggtacatggagctggtcgggtggctcgtggacaaggggattacctcggagaagcagtggatccaggaggaccaggcctcatacatctccttcaatgcggcctccaactcgcggtcccaaatcaaggctgccttggacaatgcgggaaagattatgagcctgactaaaaccgcccccgactacctggtgggccagcagcccgtggaggacatttccagcaatcggatttataaaattttggaactaaacgggtacgatccccaatatgcggcttccgtctttctgggatgggccacgaaaaagttcggcaagaggaacaccatctggctgtttgggcctgcaactaccgggaagaccaacatcgcggaggccatagcccacactgtgcccttctacgggtgcgtaaactggaccaatgagaactttcccttcaacgactgtgtcgacaagatggtgatctggtgggaggaggggaagatgaccgccaaggtcgtggagtcggccaaagccattctcggaggaagcaaggtgcgcgtggaccagaaatgcaagtcctcggcccagatagacccgactcccgtgatcgtcacctccaacaccaacatgtgcgccgtgattgacgggaactcaacgaccttcgaacaccagcagccgttgcaagaccggatgttcaaatttgaactcacccgccgtctggatcatgactttgggaaggtcaccaagcaggaagtcaaagactttttccggtgggcaaaggatcacgtggttgaggtggagcatgaattctacgtcaaaaagggtggagccaagaaaagacccgcccccagtgacgcagatataagtgagcccaaacgggtgcgcgagtcagttgcgcagccatcgacgtcagacgcggaagcttcgatcaactacgcagacaggtaccaaaacaaatgttctcgtcacgtgggcatgaatctgatgctgtttccctgcagacaatgcgagagaatgaatcagaattcaaatatctgcttcactcacggacagaaagactgtttagagtgctttcccgtgtcagaatctcaacccgtttctgtcgtcaaaaaggcgtatcagaaactgtgctacattcatcatatcatgggaaaggtgccagacgcttgcactgcctgcgatctggtcaatgtggatttggatgactgcatctttgaacaataaatgatttaaatcaggtatggctgccgatggttatcttccagattggctcgaggacactctctctgaaggaataagacagtggtggaagctcaaacctggcccaccaccaccaaagcccgcagagcggcataaggacgacagcaggggtcttgtgcttcctgggtacaagtacctcggacccttcaacggactcgacaagggagagccggtcaacgaggcagacgccgcggccctcgagcacgacaaagcctacgaccggcagctcgacagcggagacaacccgtacctcaagtacaaccacgccgacgcggagtttcaggagcgccttaaagaagatacgtcttttgggggcaacctcggacgagcagtcttccaggcgaaaaagagggttcttgaacctctgggcctggttgaggaacctgttaagacggctccgggaaaaaagaggccggtagagcactctcctgtggagccagactcctcctcgggaaccggaaaggcgggccagcagcctgcaagaaaaagattgaattttggtcagactggagacgcagactcagtacctgacccccagcctctcggacagccaccagcagccccctctggtctgggaactaatacgatggctacaggcagtggcgcaccaatggcagacaataacgagggcgccgacggagtgggtaattcctcgggaaattggcattgcgattccacatggatgggcgacagagtcatcaccaccagcacccgaacctgggccctgcccacctacaacaaccacctctacaaacaaatttccagccaatcaggagcctcgaacgacaatcactactttggctacagcaccccttgggggtattttgacttcaacagattccactgccacttttcaccacgtgactggcaaagactcatcaacaacaactggggattccgacccaagagactcaacttcaagctctttaacattcaagtcaaagaggtcacgcagaatgacggtacgacgacgattgccaataaccttaccagcacggttcaggtgtttactgactcggagtaccagctcccgtacgtcctcggctcggcgcatcaaggatgcctcccgccgttcccagcagacgtcttcatggtgccacagtatggatacctcaccctgaacaacgggagtcaggcagtaggacgctcttcattttactgcctggagtactttccttctcagatgctgcgtaccggaaacaactttaccttcagctacacttttgaggacgttcctttccacagcagctacgctcacagccagagtctggaccgtctcatgaatcctctcatcgaccagtacctgtattacttgagcagaacaaacactccaagtggaaccaccacgcagtcaaggcttcagttttctcaggccggagcgagtgacattcgggaccagtctaggaactggcttcctggaccctgttaccgccagcagcgagtatcaaagacatctgcggataacaacaacagtgaatactcgtggactggagctaccaagtaccacctcaatggcagagactctctggtgaatccgggcccggccatggcaagccacaaggacgatgaagaaaagttttttcctcagagcggggttctcatctttgggaagcaaggctcagagaaaacaaatgtggacattgaaaaggtcatgattacagacgaagaggaaatcaggacaaccaatcccgtggctacggagcagtatggttctgtatctaccaacctccagagaggcaacagacaagcagctaccgcagatgtcaacacacaaggcgttcttccaggcatggtctggcaggacagagatgtgtaccttcaggggcccatctgggcaaagattccacacacggacggacattttcacccctctcccctcatgggtggattcggacttaaacaccctcctccacagattctcatcaagaacaccccggtacctgcgaatccttcgaccaccttcagtgcggcaaagtttgcttccttcatcacacagtactccacgggacaggtcagcgtggagatcgagtgggagctgcagaaggaaaacagcaaacgctggaatcccgaaattcagtacacttccaactacaacaagtctgttaatgtggactttactgtggacactaatggcgtgtattcagagcctcgccccattggcaccagatacctgactcgtaatctgtaa

SEQ ID NO: 69 - DNA, 4093 bp, synthetic construct
  source 1..4093: mol_type = other DNA
atgccggggttttacgagattgtgattaaggtccccagcgaccttgacgagcatctgcccggcatttctgacagctttgtgaactgggtggccgagaaggaatgggagttgccgccagattctgacatggatctgaatctgattgagcaggcacccctgaccgtggccgagaagctgcagcgcgactttctgacggaatggcgccgtgtgagtaaggccccggaggctcttttctttgtgcaatttgagaagggagagagctacttccacatgcacgtgctcgtggaaaccaccggggtgaaatccatggttttgggacgtttcctgagtcagattcgcgaaaaactgattcagagaatttaccgcgggatcgagccgactttgccaaactggttcgcggtcacaaagaccagaaatggcgccggaggcgggaacaaggtggtggatgagtgctacatccccaattacttgctccccaaaacccagcctgagctccagtgggcgtggactaatatggaacagtatttaagcgcctgtttgaatctcacggagcgtaaacggttggtggcgcagcatctgacgcacgtgtcgcagacgcaggagcagaacaaagagaatcagaatcccaattctgatgcgccggtgatcagatcaaaaacttcagccaggtacatggagctggtcgggtggctcgtggacaaggggattacctcggagaagcagtggatccaggaggaccaggcctcatacatctccttcaatgcggcctccaactcgcggtcccaaatcaaggctgccttggacaatgcgggaaagattatgagcctgactaaaaccgcccccgactacctggtgggccagcagcccgtggaggacatttccagcaatcggatttataaaattttggaactaaacgggtacgatccccaatatgcggcttccgtctttctgggatgggccacgaaaaagttcggcaagaggaacaccatctggctgtttgggcctgcaactaccgggaagaccaacatcgcggaggccatagcccacactgtgcccttctacgggtgcgtaaactggaccaatgagaactttcccttcaacgactgtgtcgacaagatggtgatctggtgggaggaggggaagatgaccgccaaggtcgtggagtcggccaaagccattctcggaggaagcaaggtgcgcgtggaccagaaatgcaagtcctcggcccagatagacccgactcccgtgatcgtcacctccaacaccaacatgtgcgccgtgattgacgggaactcaacgaccttcgaacaccagcagccgttgcaagaccggatgttcaaatttgaactcacccgccgtctggatcatgactttgggaaggtcaccaagcaggaagtcaaagactttttccggtgggcaaaggatcacgtggttgaggtggagcatgaattctacgtcaaaaagggtggagccaagaaaagacccgcccccagtgacgcagatataagtgagcccaaacgggtgcgcgagtcagttgcgcagccatcgacgtcagacgcggaagcttcgatcaactacgcagacaggtaccaaaacaaatgttctcgtcacgtgggcatgaatctgatgctgtttccctgcagacaatgcgagagaatgaatcagaattcaaatatctgcttcactcacggacagaaagactgtttagagtgctttcccgtgtcagaatctcaacccgtttctgtcgtcaaaaaggcgtatcagaaactgtgctacattcatcatatcatgggaaaggtgccagacgcttgcactgcctgcgatctggtcaatgtggatttggatgactgcatctttgaacaataaatgatttaaatcaggtatggctgccgatggttatcttccagattggctcgaggacaacctctctgagggcattcgcgagtggtgggacttgaaacctggagccccgaaacccaaagccaaccagcaaaagcaggacgacggccggggtctggtgcttcctggctacaagtacctcggacccttcaacggactcgacaagggggagcccgtcaacgcggcggatgcagcggccctcgagcacgacaaggcctacgaccagcagctcaaagcgggtgacaatccgtacctgcggtataaccacgccgacgccgagtttcaggagcgtctgcaagaagatacgtcttttgggggcaacctcgggcgagcagtcttccaggccaagaagagggttctcgaaccttttggtctggttgaggaaggtgctaagacggctcctggaaagaaacgtccggtagagcagtcgccacaagagccagactcctcctcgggcattggcaagacaggccagcagcccgctaaaaagagactcaattttggtcagactggcgactcagagtcagtccccgacccacaacctctcggagaacctccagcaacccccgctgctgtgggacctactacaatggcttcaggcggtggcgcaccaatggcagacaataacgaaggcgccgacggagtgggtaatgcctcaggaaattggcattgcgattccacatggctgggcgacagagtcatcaccaccagcacccgaacatgggccttgcccacctataacaaccacctctacaagcaaatctccagtgcttcaacgggggccagcaacgacaaccactacttcggctacagcaccccctgggggtattttgatttcaacagattccactgccatttctcaccacgtgactggcagcgactcatcaacaacaattggggattccggcccaagagactcaacttcaagctcttcaacatccaagtcaaggaggtcacgacgaatgatggcgtcacgaccatcgctaataaccttaccagcacggttcaagtcttctcggactcggagtaccagttgccgtacgtcctcggctctgcgcaccagggctgcctccctccgttcccggcggacgtgttcatgattccgcagtacggctacctaacgctcaacaatggcagccaggcagtgggacggtcatccttttactgcctggaatatttcccatcgcagatgctgagaacgggcaataactttaccttcagctacaccttcgaggacgtgcctttccacagcagctacgcgcacagccagagcctggaccggctgatgaatcctctcatcgaccagtacctgtattacctgaacagaactcagaatcagtccggaagtgcccaaaacaaggacttgctgtttagccgggggtctccagctggcatgtctgttcagcccaaaaactggctacctggaccctgttaccggcagcagcgcgtttctaaaacaaaaacagacaacaacaacagcaactttacctggactggtgcttcaaaatataaccttaatgggcgtgaatctataatcaaccctggcactgctatggcctcacacaaagacgacaaagacaagttctttcccatgagcggtgtcatgatttttggaaaggagagcgccggagcttcaaacactgcattggacaatgtcatgatcacagacgaagaggaaatcaaagccactaaccccgtggccaccgaaagatttgggactgtggcagtcaatctccagagcagcagcacagaccctgcgaccggagatgtgcatgttatgggagccttacctggaatggtgtggcaagacagagacgtatacctgcagggtcctatttgggccaaaattcctcacacggatggacactttcacccgtctcctctcatgggcggctttggacttaagcacccgcctcctcagatcctcatcaaaaacacgcctgttcctgcgaatcctccggcagagttttcggctacaaagtttgcttcattcatcacccagtattccacaggacaagtgagcgtggagattgaatgggagctgcagaaagaaaacagcaaacgctggaatcccgaagtgcagtatacatctaactatgcaaaatctgccaacgttgatttcactgtggacaacaatggactttatactgagcctcgccccattggcacccgttacctcacccgtcccctgtaa

SEQ ID NO: 70 - DNA, 4099 bp, synthetic construct
  source 1..4099: mol_type = other DNA
atgccggggttttacgagattgtgattaaggtccccagcgaccttgacgagcatctgcccggcatttctgacagctttgtgaactgggtggccgagaaggaatgggagttgccgccagattctgacatggatctgaatctgattgagcaggcacccctgaccgtggccgagaagctgcagcgcgactttctgacggaatggcgccgtgtgagtaaggccccggaggctcttttctttgtgcaatttgagaagggagagagctacttccacatgcacgtgctcgtggaaaccaccggggtgaaatccatggttttgggacgtttcctgagtcagattcgcgaaaaactgattcagagaatttaccgcgggatcgagccgactttgccaaactggttcgcggtcacaaagaccagaaatggcgccggaggcgggaacaaggtggtggatgagtgctacatccccaattacttgctccccaaaacccagcctgagctccagtgggcgtggactaatatggaacagtatttaagcgcctgtttgaatctcacggagcgtaaacggttggtggcgcagcatctgacgcacgtgtcgcagacgcaggagcagaacaaagagaatcagaatcccaattctgatgcgccggtgatcagatcaaaaacttcagccaggtacatggagctggtcgggtggctcgtggacaaggggattacctcggagaagcagtggatccaggaggaccaggcctcatacatctccttcaatgcggcctccaactcgcggtcccaaatcaaggctgccttggacaatgcgggaaagattatgagcctgactaaaaccgcccccgactacctggtgggccagcagcccgtggaggacatttccagcaatcggatttataaaattttggaactaaacgggtacgatccccaatatgcggcttccgtctttctgggatgggccacgaaaaagttcggcaagaggaacaccatctggctgtttgggcctgcaactaccgggaagaccaacatcgcggaggccatagcccacactgtgcccttctacgggtgcgtaaactggaccaatgagaactttcccttcaacgactgtgtcgacaagatggtgatctggtgggaggaggggaagatgaccgccaaggtcgtggagtcggccaaagccattctcggaggaagcaaggtgcgcgtggaccagaaatgcaagtcctcggcccagatagacccgactcccgtgatcgtcacctccaacaccaacatgtgcgccgtgattgacgggaactcaacgaccttcgaacaccagcagccgttgcaagaccggatgttcaaatttgaactcacccgccgtctggatcatgactttgggaaggtcaccaagcaggaagtcaaagactttttccggtgggcaaaggatcacgtggttgaggtggagcatgaattctacgtcaaaaagggtggagccaagaaaagacccgcccccagtgacgcagatataagtgagcccaaacgggtgcgcgagtcagttgcgcagccatcgacgtcagacgcggaagcttcgatcaactacgcagacaggtaccaaaacaaatgttctcgtcacgtgggcatgaatctgatgctgtttccctgcagacaatgcgagagaatgaatcagaattcaaatatctgcttcactcacggacagaaagactgtttagagtgctttcccgtgtcagaatctcaacccgtttctgtcgtcaaaaaggcgtatcagaaactgtgctacattcatcatatcatgggaaaggtgccagacgcttgcactgcctgcgatctggtcaatgtggatttggatgactgcatctttgaacaataaatgatttaaatcaggtatggctgccgatggttatcttccagattggctcgaggacaacctctctgagggcattcgcgagtggtgggcgctgaaacctggagccccgaagcccaaagccaaccagcaaaagcaggacgacggccggggtctggtgcttcctggctacaagtacctcggacccttcaacggactcgacaagggggagcccgtcaacgcggcggacgcagcggccctcgagcacgacaaggcctacgaccagcagctgcaggcgggtgacaatccgtacctgcggtataaccacgccgacgccgagtttcaggagcgtctgcaagaagatacgtcttttgggggcaacctcgggcgagcagtcttccaggccaagaagcgggttctcgaacctctcggtctggttgaggaaggcgctaagacggctcctggaaagaagagaccggtagagccatcaccccagcgttctccagactcctctacgggcatcggcaagaaaggccaacagcccgccagaaaaagactcaattttggtcagactggcgactcagagtcagttccagaccctcaacctctcggagaacctccagcagcgccctctggtgtgggacctaatacaatggctgcaggcggtggcgcaccaatggcagacaataacgaaggcgccgacggagtgggtagttcctcgggaaattggcattgcgattccacatggctgggcgacagagtcatcaccaccagcacccgaacctgggccctgcccacctacaacaaccacctctacaagcaaatctccaacgggacatcgggaggagccaccaacgacaacacctacttcggctacagcaccccctgggggtattttgactttaacagattccactgccacttttcaccacgtgactggcagcgactcatcaacaacaactggggattccggcccaagagactcagcttcaagctcttcaacatccaggtcaaggaggtcacgcagaatgaaggcaccaagaccatcgccaataacctcaccagcaccatccaggtgtttacggactcggagtaccagctgccgtacgttctcggctctgcccaccagggctgcctgcctccgttcccggcggacgtgttcatgattccccagtacggctacctaacactcaacaacggtagtcaggccgtgggacgctcctccttctactgcctggaatactttccttcgcagatgctgagaaccggcaacaacttccagtttacttacaccttcgaggacgtgcctttccacagcagctacgcccacagccagagcttggaccggctgatgaatcctctgattgaccagtacctgtactacttgtctcggactcaaacaacaggaggcacggcaaatacgcagactctgggcttcagccaaggtgggcctaatacaatggccaatcaggcaaagaactggctgccaggaccctgttaccgccaacaacgcgtctcaacgacaaccgggcaaaacaacaatagcaactttgcctggactgctgggaccaaataccatctgaatggaagaaattcattggctaatcctggcatcgctatggcaacacacaaagacgacgaggagcgtttttttcccagtaacgggatcctgatttttggcaaacaaaatgctgccagagacaatgcggattacagcgatgtcatgctcaccagcgaggaagaaatcaaaaccactaaccctgtggctacagaggaatacggtatcgtggcagataacttgcagcagcaaaacacggctcctcaaattggaactgtcaacagccagggggccttacccggtatggtctggcagaaccgggacgtgtacctgcagggtcccatctgggccaagattcctcacacggacggcaacttccacccgtctccgctgatgggcggctttggcctgaaacatcctccgcctcagatcctgatcaagaacacgcctgtacctgcggatcctccgaccaccttcaaccagtcaaagctgaactctttcatcacgcaatacagcaccggacaggtcagcgtggaaattgaatgggagctgcagaaggaaaacagcaagcgctggaaccccgagatccagtacacctccaactactacaaatctacaagtgtggactttgctgttaatacagaaggcgtgtactctgaaccccgccccattggcacccgttacctcacccgtaatctgtaa

SEQ ID NO: 71 - DNA, 4093 bp, synthetic construct
  source 1..4093: mol_type = other DNA
atgccggggttttacgagattgtgattaaggtccccagcgaccttgacgagcatctgcccggcatttctgacagctttgtgaactgggtggccgagaaggaatgggagttgccgccagattctgacatggatctgaatctgattgagcaggcacccctgaccgtggccgagaagctgcagcgcgactttctgacggaatggcgccgtgtgagtaaggccccggaggctcttttctttgtgcaatttgagaagggagagagctacttccacatgcacgtgctcgtggaaaccaccggggtgaaatccatggttttgggacgtttcctgagtcagattcgcgaaaaactgattcagagaatttaccgcgggatcgagccgactttgccaaactggttcgcggtcacaaagaccagaaatggcgccggaggcgggaacaaggtggtggatgagtgctacatccccaattacttgctccccaaaacccagcctgagctccagtgggcgtggactaatatggaacagtatttaagcgcctgtttgaatctcacggagcgtaaacggttggtggcgcagcatctgacgcacgtgtcgcagacgcaggagcagaacaaagagaatcagaatcccaattctgatgcgccggtgatcagatcaaaaacttcagccaggtacatggagctggtcgggtggctcgtggacaaggggattacctcggagaagcagtggatccaggaggaccaggcctcatacatctccttcaatgcggcctccaactcgcggtcccaaatcaaggctgccttggacaatgcgggaaagattatgagcctgactaaaaccgcccccgactacctggtgggccagcagcccgtggaggacatttccagcaatcggatttataaaattttggaactaaacgggtacgatccccaatatgcggcttccgtctttctgggatgggccacgaaaaagttcggcaagaggaacaccatctggctgtttgggcctgcaactaccgggaagaccaacatcgcggaggccatagcccacactgtgcccttctacgggtgcgtaaactggaccaatgagaactttcccttcaacgactgtgtcgacaagatggtgatctggtgggaggaggggaagatgaccgccaaggtcgtggagtcggccaaagccattctcggaggaagcaaggtgcgcgtggaccagaaatgcaagtcctcggcccagatagacccgactcccgtgatcgtcacctccaacaccaacatgtgcgccgtgattgacgggaactcaacgaccttcgaacaccagcagccgttgcaagaccggatgttcaaatttgaactcacccgccgtctggatcatgactttgggaaggtcaccaagcaggaagtcaaagactttttccggtgggcaaaggatcacgtggttgaggtggagcatgaattctacgtcaaaaagggtggagccaagaaaagacccgcccccagtgacgcagatataagtgagcccaaacgggtgcgcgagtcagttgcgcagccatcgacgtcagacgcggaagcttcgatcaactacgcagacaggtaccaaaacaaatgttctcgtcacgtgggcatgaatctgatgctgtttccctgcagacaatgcgagagaatgaatcagaattcaaatatctgcttcactcacggacagaaagactgtttagagtgctttcccgtgtcagaatctcaacccgtttctgtcgtcaaaaaggcgtatcagaaactgtgctacattcatcatatcatgggaaaggtgccagacgcttgcactgcctgcgatctggtcaatgtggatttggatgactgcatctttgaacaataaatgatttaaatcaggtatggctgccgatggttatcttccagattggctcgaggacaaccttagtgaaggaattcgcgagtggtgggctttgaaacctggagcccctcaacccaaggcaaatcaacaacatcaagacaacgctcgaggtcttgtgcttccgggttacaaataccttggacccggcaacggactcgacaagggggagccggtcaacgcagcagacgcggcggccctcgagcacgacaaggcctacgaccagcagctcaaggccggagacaacccgtacctcaagtacaaccacgccgacgccgagttccaggagcggctcaaagaagatacgtcttttgggggcaacctcgggcgagcagtcttccaggccaaaaagaggcttcttgaacctcttggtctggttgaggaagcggctaagacggctcctggaaagaagaggcctgtagagcagtctcctcaggaaccggactcctccgcgggtattggcaaatcgggtgcacagcccgctaaaaagagactcaatttcggtcagactggcgacacagagtcagtcccagaccctcaaccaatcggagaacctcccgcagccccctcaggtgtgggatctcttacaatggcttcaggtggtggcgcaccagtggcagacaataacgaaggtgccgatggagtgggtagttcctcgggaaattggcattgcgattcccaatggctgggggacagagtcatcaccaccagcacccgaacctgggccctgcccacctacaacaatcacctctacaagcaaatctccaacagcacatctggaggatcttcaaatgacaacgcctacttcggctacagcaccccctgggggtattttgacttcaacagattccactgccacttctcaccacgtgactggcagcgactcatcaacaacaactggggattccggcctaagcgactcaacttcaagctcttcaacattcaggtcaaagaggttacggacaacaatggagtcaagaccatcgccaataaccttaccagcacggtccaggtcttcacggactcagactatcagctcccgtacgtgctcgggtcggctcacgagggctgcctcccgccgttcccagcggacgttttcatgattcctcagtacgggtatctgacgcttaatgatggaagccaggccgtgggtcgttcgtccttttactgcctggaatatttcccgtcgcaaatgctaagaacgggtaacaacttccagttcagctacgagtttgagaacgtacctttccatagcagctacgctcacagccaaagcctggaccgactaatgaatccactcatcgaccaatacttgtactatctctcaaagactattaacggttctggacagaatcaacaaacgctaaaattcagtgtggccggacccagcaacatggctgtccagggaagaaactacatacctggacccagctaccgacaacaacgtgtctcaaccactgtgactcaaaacaacaacagcgaatttgcttggcctggagcttcttcttgggctctcaatggacgtaatagcttgatgaatcctggacctgctatggccagccacaaagaaggagaggaccgtttctttcctttgtctggatctttaatttttggcaaacaaggaactggaagagacaacgtggatgcggacaaagtcatgataaccaacgaagaagaaattaaaactactaacccggtagcaacggagtcctatggacaagtggccacaaaccaccagagtgcccaagcacaggcgcagaccggctgggttcaaaaccaaggaatacttccgggtatggtttggcaggacagagatgtgtacctgcaaggacccatttgggccaaaattcctcacacggacggcaactttcacccttctccgctgatgggagggtttggaatgaagcacccgcctcctcagatcctcatcaaaaacacacctgtacctgcggatcctccaacggccttcaacaaggacaagctgaactctttcatcacccagtattctactggccaagtcagcgtggagatcgagtgggagctgcagaaggaaaacagcaagcgctggaacccggagatccagtacacttccaactattacaagtctaataatgttgaatttgctgttaatactgaaggtgtatatagtgaaccccgccccattggcaccagatacctgactcgtaatctgtaa

SEQ ID NO: 72 - DNA, 11784 bp, synthetic construct
  source 1..11784: mol_type = other DNA
atgccggggttttacgagattgtgattaaggtccccagcgaccttgacgagcatctgcccggcatttctgacagctttgtgaactgggtggccgagaaggaatgggagttgccgccagattctgacatggatctgaatctgattgagcaggcacccctgaccgtggccgagaagctgcagcgcgactttctgacggaatggcgccgtgtgagtaaggccccggaggctcttttctttgtgcaatttgagaagggagagagctacttccacatgcacgtgctcgtggaaaccaccggggtgaaatccatggttttgggacgtttcctgagtcagattcgcgaaaaactgattcagagaatttaccgcgggatcgagccgactttgccaaactggttcgcggtcacaaagaccagaaatggcgccggaggcgggaacaaggtggtggatgagtgctacatccccaattacttgctccccaaaacccagcctgagctccagtgggcgtggactaatatggaacagtatttaagcgcctgtttgaatctcacggagcgtaaacggttggtggcgcagcatctgacgcacgtgtcgcagacgcaggagcagaacaaagagaatcagaatcccaattctgatgcgccggtgatcagatcaaaaacttcagccaggtacatggagctggtcgggtggctcgtggacaaggggattacctcggagaagcagtggatccaggaggaccaggcctcatacatctccttcaatgcggcctccaactcgcggtcccaaatcaaggctgccttggacaatgcgggaaagattatgagcctgactaaaaccgcccccgactacctggtgggccagcagcccgtggaggacatttccagcaatcggatttataaaattttggaactaaacgggtacgatccccaatatgcggcttccgtctttctgggatgggccacgaaaaagttcggcaagaggaacaccatctggctgtttgggcctgcaactaccgggaagaccaacatcgcggaggccatagcccacactgtgcccttctacgggtgcgtaaactggaccaatgagaactttcccttcaacgactgtgtcgacaagatggtgatctggtgggaggaggggaagatgaccgccaaggtcgtggagtcggccaaagccattctcggaggaagcaaggtgcgcgtggaccagaaatgcaagtcctcggcccagatagacccgactcccgtgatcgtcacctccaacaccaacatgtgcgccgtgattgacgggaactcaacgaccttcgaacaccagcagccgttgcaagaccggatgttcaaatttgaactcacccgccgtctggatcatgactttgggaaggtcaccaagcaggaagtcaaagactttttccggtgggcaaaggatcacgtggttgaggtggagcatgaattctacgtcaaaaagggtggagccaagaaaagacccgcccccagtgacgcagatataagtgagcccaaacgggtgcgcgagtcagttgcgcagccatcgacgtcagacgcggaagcttcgatcaactacgcagacaggtaccaaaacaaatgttctcgtcacgtgggcatgaatctgatgctgtttccctgcagacaatgcgagagaatgaatcagaattcaaatatctgcttcactcacggacagaaagactgtttagagtgctttcccgtgtcagaatctcaacccgtttctgtcgtcaaaaaggcgtatcagaaactgtgctacattcatcatatcatgggaaaggtgccagacgcttgcactgcctgcgatctggtcaatgtggatttggatgactgcatctttgaacaataaatgatttaaatcaggtatggctgccgatggttatcttccagattggctcgaggacaacctctctgagggcattcgcgagtggtgggcgctgaaacctggagccccgaagcccaaagccaaccagcaaaagcaggacgacggccggggtctggtgcttcctggctacaagtacctcggacccttcaacggactcgacaagggggagcccgtcaacgcggcggacgcagcggccctcgagcacgacaaggcctacgaccagcagctgcaggcgggtgacaatccgtacctgcggtataaccacgccgacgccgagtttcaggagcgtctgcaagaagatacgtcttttgggggcaacctcgggcgagcagtcttccaggccaagaagcgggttctcgaacctctcggtctggttgaggaaggcgctaagacggctcctggaaagaagagaccggtagagccatcaccccagcgttctccagactcctctacgggcatcggcaagaaaggccaacagcccgccagaaaaagactcaattttggtcagactggcgactcagagtcagttccagaccctcaacctctcggagaacctccagcagcgccctctggtgtgggacctaatacaatggctgcaggcggtggcgcaccaatggcagacaataacgaaggcgccgacggagtgggtagttcctcgggaaattggcattgcgattccacatggctgggcgacagagtcatcaccaccagcacccgaacctgggccctgcccacctacaacaaccacctctacaagcaaatctccaacgggacatcgggaggagccaccaacgacaacacctacttcggctacagcaccccctgggggtattttgactttaacagattccactgccacttttcaccacgtgactggcagcgactcatcaacaacaactggggattccggcccaagagactcagcttcaagctcttcaacatccaggtcaaggaggtcacgcagaatgaaggcaccaagaccatcgccaataacctcaccagcaccatccaggtgtttacggactcggagtaccagctgccgtacgttctcggctctgcccaccagggctgcctgcctccgttcccggcggacgtgttcatgattccccagtacggctacctaacactcaacaacggtagtcaggccgtgggacgctcctccttctactgcctggaatactttccttcgcagatgctgagaaccggcaacaacttccagtttacttacaccttcgaggacgtgcctttccacagcagctacgcccacagccagagcttggaccggctgatgaatcctctgattgaccagtacctgtactacttgtctcggactcaaacaacaggaggcacggcaaatacgcagactctgggcttcagccaaggtgggcctaatacaatggccaatcaggcaaagaactggctgccaggaccctgttaccgccaacaacgcgtctcaacgacaaccgggcaaaacaacaatagcaactttgcctggactgctgggaccaaataccatctgaatggaagaaattcattggctaatcctggcatcgctatggcaacacacaaagacgacgaggagcgtttttttcccagtaacgggatcctgatttttggcaaacaaaatgctgccagagacaatgcggattacagcgatgtcatgctcaccagcgaggaagaaatcaaaaccactaaccctgtggctacagaggaatacggtatcgtggcagataacttgcagcagcaaaacacggctcctcaaattggaactgtcaacagccagggggccttacccggtatggtctggcagaaccgggacgtgtacctgcagggtcccatctgggccaagattcctcacacggacggcaacttccacccgtctccgctgatgggcggctttggcctgaaacatcctccgcctcagatcctgatcaagaacacgcctgtacctgcggatcctccgaccaccttcaaccagtcaaagctgaactctttcatcacgcaatacagcaccggacaggtcagcgtggaaattgaatgggagctgcagaaggaaaacagcaagcgctggaaccccgagatccagtacacctccaactactacaaatctacaagtgtggactttgctgttaatacagaaggcgtgtactctgaaccccgccccattggcacccgttacctcacccgtaatctgtaattgcctgttaatcaataaaccggttgattcgtttcagttgaactttggtctctgcgaagggcgaattcgtttaaacctgcaggactagaggtcctgtattagaggtcacgtgagtgttttgcgacattttgcgacaccatgtggtcacgctgggtatttaagcccgagtgagcacgcagggtctccattttgaagcgggaggtttgaacgcgcagccgccaagccgaattctgcatcgcgatagggataacagggtaataaataatgtactagagacactttcaataaaggcaaatgcttttatttgtacactctcgggtgattatttacccccacccttgccgtctgcgccgtttaaaaatcaaaggggttctgccgcgcatcgctatgcgccactggcagggacacgttgcgatactggtgtttagtgctccacttaaactcaggcacaaccatccgcggcagctcggtgaagttttcactccacaggctgcgcaccatcaccaacgcgtttagcaggtcgggcgccgatatcttgaagtcgcagttggggcctccgccctgcgcgcgcgagttgcgatacacagggttgcagcactggaacactatcagcgccgggtggtgcacgctggccagcacgctcttgtcggagatcagatccgcgtccaggtcctccgcgttgctcagggcgaacggagtcaactttggtagctgccttcccaaaaagggcgcgtgcccaggctttgagttgcactcgcaccgtagtggcatcaaaaggtgaccgtgcccggtctgggcgttaggatacagcgcctgcataaaagccttgatctgcttaaaagccacctgagcctttgcgccttcagagaagaacatgccgcaagacttgccggaaaactgattggccggacaggccgcgtcgtgcacgcagcaccttgcgtcggtgttggagatctgcaccacatttcggccccaccggttcttcacgatcttggccttgctagactgctccttcagcgcgcgctgcccgttttcgctcgtcacatccatttcaatcacgtgctccttatttatcataatgcttccgtgtagacacttaagctcgccttcgatctcagcgcagcggtgcagccacaacgcgcagcccgtgggctcgtgatgcttgtaggtcacctctgcaaacgactgcaggtacgcctgcaggaatcgccccatcatcgtcacaaaggtcttgttgctggtgaaggtcagctgcaacccgcggtgctcctcgttcagccaggtcttgcatacggccgccagagcttccacttggtcaggcagtagtttgaagttcgcctttagatcgttatccacgtggtacttgtccatcagcgcgcgcgcagcctccatgcccttctcccacgcagacacgatcggcacactcagcgggttcatcaccgtaatttcactttccgcttcgctgggctcttcctcttcctcttgcgtccgcataccacgcgccactgggtcgtcttcattcagccgccgcactgtgcgcttacctcctttgccatgcttgattagcaccggtgggttgctgaaacccaccatttgtagcgccacatcttctctttcttcctcgctgtccacgattacctctggtgatggcgggcgctcgggcttgggagaagggcgcttctttttcttcttgggcgcaatggccaaatccgccgccgaggtcgatggccgcgggctgggtgtgcgcggcaccagcgcgtcttgtgatgagtcttcctcgtcctcggactcgatacgccgcctcatccgcttttttgggggcgcccggggaggcggcggcgacggggacggggacgacacgtcctccatggttgggggacgtcgcgccgcaccgcgtccgcgctcgggggtggtttcgcgctgctcctcttcccgactggccatttccttctcctataggcagaaaaagatcatggagtcagtcgagaagaaggacagcctaaccgccccctctgagttcgccaccaccgcctccaccgatgccgccaacgcgcctaccaccttccccgtcgaggcacccccgcttgaggaggaggaagtgattatcgagcaggacccaggttttgtaagcgaagacgacgaggaccgctcagtaccaacagaggataaaaagcaagaccaggacaacgcagaggcaaacgaggaacaagtcgggcggggggacgaaaggcatggcgactacctagatgtgggagacgacgtgctgttgaagcatctgcagcgccagtgcgccattatctgcgacgcgttgcaagagcgcagcgatgtgcccctcgccatagcggatgtcagccttgcctacgaacgccacctattctcaccgcgcgtaccccccaaacgccaagaaaacggcacatgcgagcccaacccgcgcctcaacttctaccccgtatttgccgtgccagaggtgcttgccacctatcacatctttttccaaaactgcaagatacccctatcctgccgtgccaaccgcagccgagcggacaagcagctggccttgcggcagggcgctgtcatacctgatatcgcctcgctcaacgaagtgccaaaaatctttgagggtcttggacgcgacgagaagcgcgcggcaaacgctctgcaacaggaaaacagcgaaaatgaaagtcactctggagtgttggtggaactcgagggtgacaacgcgcgcctagccgtactaaaacgcagcatcgaggtcacccactttgcctacccggcacttaacctaccccccaaggtcatgagcacagtcatgagtgagctgatcgtgcgccgtgcgcagcccctggagagggatgcaaatttgcaagaacaaacagaggagggcctacccgcagttggcgacgagcagctagcgcgctggcttcaaacgcgcgagcctgccgacttggaggagcgacgcaaactaatgatggccgcagtgctcgttaccgtggagcttgagtgcatgcagcggttctttgctgacccggagatgcagcgcaagctagaggaaacattgcactacacctttcgacagggctacgtacgccaggcctgcaagatctccaacgtggagctctgcaacctggtctcctaccttggaattttgcacgaaaaccgccttgggcaaaacgtgcttcattccacgctcaagggcgaggcgcgccgcgactacgtccgcgactgcgtttacttatttctatgctacacctggcagacggccatgggcgtttggcagcagtgcttggaggagtgcaacctcaaggagctgcagaaactgctaaagcaaaacttgaaggacctatggacggccttcaacgagcgctccgtggccgcgcacctggcggacatcattttccccgaacgcctgcttaaaaccctgcaacagggtctgccagacttcaccagtcaaagcatgttgcagaactttaggaactttatcctagagcgctcaggaatcttgcccgccacctgctgtgcacttcctagcgactttgtgcccattaagtaccgcgaatgccctccgccgctttggggccactgctaccttctgcagctagccaactaccttgcctaccactctgacataatggaagacgtgagcggtgacggtctactggagtgtcactgtcgctgcaacctatgcaccccgcaccgctccctggtttgcaattcgcagctgcttaacgaaagtcaaattatcggtacctttgagctgcagggtccctcgcctgacgaaaagtccgcggctccggggttgaaactcactccggggctgtggacgtcggcttaccttcgcaaatttgtacctgaggactaccacgcccacgagattaggttctacgaagaccaatcccgcccgcctaatgcggagcttaccgcctgcgtcattacccagggccacattcttggccaattgcaagccatcaacaaagcccgccaagagtttctgctacgaaagggacggggggtttacttggacccccagtccggcgaggagctcaacccaatccccccgccgccgcagccctatcagcagcagccgcgggcccttgcttcccaggatggcacccaaaaagaagctgcagctgccgccgccacccacggacgaggaggaatactgggacagtcaggcagaggaggttttggacgaggaggaggaggacatgatggaagactgggagagcctagacgaggaagcttccgaggtcgaagaggtgtcagacgaaacaccgtcaccctcggtcgcattcccctcgccggcgccccagaaatcggcaaccggttccagcatggctacaacctccgctcctcaggcgccgccggcactgcccgttcgccgacccaaccgtagatgggacaccactggaaccagggccggtaagtccaagcagccgccgccgttagcccaagagcaacaacagcgccaaggctaccgctcatggcgcgggcacaagaacgccatagttgcttgcttgcaagactgtgggggcaacatctccttcgcccgccgctttcttctctaccatcacggcgtggccttcccccgtaacatcctgcattactaccgtcatctctacagcccatactgcaccggcggcagcggcagcaacagcagcggccacacagaagcaaaggcgaccggatagcaagactctgacaaagcccaagaaatccacagcggcggcagcagcaggaggaggagcgctgcgtctggcgcccaacgaacccgtatcgacccgcgagcttagaaacaggatttttcccactctgtatgctatatttcaacagagcaggggccaagaacaagagctgaaaataaaaaacaggtctctgcgatccctcacccgcagctgcctgtatcacaaaagcgaagatcagcttcggcgcacgctggaagacgcggaggctctcttcagtaaatactgcgcgctgactcttaaggactagtttcgcgccctttctcaaatttaagcgcgaaaactacgtcatctccagcggccacacccggcgccagcacctgttgtcagcgccattttttagggcggagtaacttgtatgtgttgggaattgtagttttcttaaaatgggaagtgacgtaacgtgggaaaacggaagtgacgatttgaggaagttgtgggttttttggctttcgtttctgggcgtaggttcgcgtgcggttttctgggtgttttttgtggactttaaccgttacgtcattttttagtcctatatatactcgctctgcacttggcccttttttacactgtgactgattgagctggtgccgtgtcgagtggtgtttttttaataggttttcttttttactggtaaggctgactgttatgactacgtccggcgttccatttggcatgacactacgaccaacacgatctcggttgtctcggcgcactccgtacagtagggatcgtctacctccttttgagacagaaacccgcgctaccatactggaggatcatccgctgctgcccgaatgtaacactttgacaatgcacaacgtgagttacgtgcgaggtcttccctgcagtgtgggatttacgctgattcaggaatgggttgttccctgggatatggttctaacgcgggaggagcttgtaatcctgaggaagtgtatgcacgtgtgcctgtgttgtgccaacattgatatcatgacgagcatgatgatccatggttacgagtcctgggctctccactgtcattgttccagtcccggttccctgcagtgtatagccggcgggcaggttttggccagctggtttaggatggtggtggatggcgccatgtttaatcagaggtttatatggtaccgggaggtggtgaattacaacatgccaaaagaggtaatgtttatgtccagcgtgtttatgaggggtcgccacttaatctacctgcgcttgtggtatgatggccacgtgggttctgtggtccccgccatgagctttggatacagcgccttgcactgtgggattttgaacaatattgtggtgctgtgctgcagttactgtgctgatttaagtgagatcagggtgcgctgctgtgcccggaggacaaggcgccttatgctgcgggcggtgcgaatcatcgctgaggagaccactgccatgttgtattcctgcaggacggagcggcggcggcagcagtttattcgcgcgctgctgcagcaccaccgccctatcctgatgcacgattatgactctacccccatgtaggcgtggacttctccttcgccgcccgttaagcaaccgcaagttggacagcagcctgtggctcagcagctggacagcgacatgaacttaagtgagctgcccggggagtttattaatatcactgatgagcgtttggctcgacaggaaaccgtgtggaatataacacctaagaatatgtctgttacccatgatatgatgctttttaaggccagccggggagaaaggactgtgtactctgtgtgttgggagggaggtggcaggttgaatactagggttctgtgagtttgattaaggtacggtgatctgtataagctatgtggtggtggggctatactactgaatgaaaaatgacttgaaattttctgcaattgaaaaataaacacgttgaaacataacacaaacgattctttattcttgggcaatgtatgaaaaagtgtaagaggatgtggcaaatatttcattaatgtagttgtggccagaccagtcccatgaaaatgacatagagtatgcacttggagttgtgtctcctgtttcctgtgtaccgtttagtgtaatggttagtgttacaggtttagttttgtctccgtttaagtaaacttgactgacaatgttacttttggcagttttaccgtgagattttggataagctgataggttaggcataaatccaacagcgtttgtataggctgtcgcccctcctgacgcggtaggaggaggggagggtgccctgcatgtctgccgctgctcttgctcttgccgctgctgaggaggggggcgcatctgccgcagcaccggatgcatctgggaaaagcaaaaaaggggctcgtccctgtttccggaggaatttgcaagcggggtcttgcatgacggggaggcaaacccccgttcgccgcagtccggccggtccgagactcgaaccgggggtcccgcgactcaacccttggaaaataaccctccggctacagggagcgagccacttaatgctttcgctttccagcctaaccgcttacgctgcgcgcggccagtggccaaaaaagctagcgcagcagccgccgcgcctggaaggaagccaaaaggagcactcccccgttgtctgacgtcgcacacctgggttcgacacgcgggcggtaaccgcatggatcacggcggacggccggatacggggctcgaaccccggtcgtccgccatgatacccttgcgaatttatccaccagaccacggaagagtgcccgcttacaggctctccttttgcacggtctagagcgtcaacgattgcgcgcgcctgaccggccagagcgtcccgaccatggagcactttttgccgctgcgcaacatctggaaccgcgtccgcgactttccgcgcgcctccaccaccgccgccggcatcacctggatgtccaggtacatctacggata

SEQ ID NO: 73 - DNA, 9958 bp, synthetic construct
  source 1..9958: mol_type = other DNA
atgccggggttttacgagattgtgattaaggtccccagcgaccttgacgagcatctgcccggcatttctgacagctttgtgaactgggtggccgagaaggaatgggagttgccgccagattctgacatggatctgaatctgattgagcaggcacccctgaccgtggccgagaagctgcagcgcgactttctgacggaatggcgccgtgtgagtaaggccccggaggctcttttctttgtgcaatttgagaagggagagagctacttccacatgcacgtgctcgtggaaaccaccggggtgaaatccatggttttgggacgtttcctgagtcagattcgcgaaaaactgattcagagaatttaccgcgggatcgagccgactttgccaaactggttcgcggtcacaaagaccagaaatggcgccggaggcgggaacaaggtggtggatgagtgctacatccccaattacttgctccccaaaacccagcctgagctccagtgggcgtggactaatatggaacagtatttaagcgcctgtttgaatctcacggagcgtaaacggttggtggcgcagcatctgacgcacgtgtcgcagacgcaggagcagaacaaagagaatcagaatcccaattctgatgcgccggtgatcagatcaaaaacttcagccaggtacatggagctggtcgggtggctcgtggacaaggggattacctcggagaagcagtggatccaggaggaccaggcctcatacatctccttcaatgcggcctccaactcgcggtcccaaatcaaggctgccttggacaatgcgggaaagattatgagcctgactaaaaccgcccccgactacctggtgggccagcagcccgtggaggacatttccagcaatcggatttataaaattttggaactaaacgggtacgatccccaatatgcggcttccgtctttctgggatgggccacgaaaaagttcggcaagaggaacaccatctggctgtttgggcctgcaactaccgggaagaccaacatcgcggaggccatagcccacactgtgcccttctacgggtgcgtaaactggaccaatgagaactttcccttcaacgactgtgtcgacaagatggtgatctggtgggaggaggggaagatgaccgccaaggtcgtggagtcggccaaagccattctcggaggaagcaaggtgcgcgtggaccagaaatgcaagtcctcggcccagatagacccgactcccgtgatcgtcacctccaacaccaacatgtgcgccgtgattgacgggaactcaacgaccttcgaacaccagcagccgttgcaagaccggatgttcaaatttgaactcacccgccgtctggatcatgactttgggaaggtcaccaagcaggaagtcaaagactttttccggtgggcaaaggatcacgtggttgaggtggagcatgaattctacgtcaaaaagggtggagccaagaaaagacccgcccccagtgacgcagatataagtgagcccaaacgggtgcgcgagtcagttgcgcagccatcgacgtcagacgcggaagcttcgatcaactacgcagacaggtaccaaaacaaatgttctcgtcacgtgggcatgaatctgatgctgtttccctgcagacaatgcgagagaatgaatcagaattcaaatatctgcttcactcacggacagaaagactgtttagagtgctttcccgtgtcagaatctcaacccgtttctgtcgtcaaaaaggcgtatcagaaactgtgctacattcatcatatcatgggaaaggtgccagacgcttgcactgcctgcgatctggtcaatgtggatttggatgactgcatctttgaacaataaatgatttaaatcaggtatggctgccgatggttatcttccagattggctcgaggacaacctctctgagggcattcgcgagtggtgggcgctgaaacctggagccccgaagcccaaagccaaccagcaaaagcaggacgacggccggggtctggtgcttcctggctacaagtacctcggacccttcaacggactcgacaagggggagcccgtcaacgcggcggacgcagcggccctcgagcacgacaaggcctacgaccagcagctgcaggcgggtgacaatccgtacctgcggtataaccacgccgacgccgagtttcaggagcgtctgcaagaagatacgtcttttgggggcaacctcgggcgagcagtcttccaggccaagaagcgggttctcgaacctctcggtctggttgaggaaggcgctaagacggctcctggaaagaagagaccggtagagccatcaccccagcgttctccagactcctctacgggcatcggcaagaaaggccaacagcccgccagaaaaagactcaattttggtcagactggcgactcagagtcagttccagaccctcaacctctcggagaacctccagcagcgccctctggtgtgggacctaatacaatggctgcaggcggtggcgcaccaatggcagacaataacgaaggcgccgacggagtgggtagttcctcgggaaattggcattgcgattccacatggctgggcgacagagtcatcaccaccagcacccgaacctgggccctgcccacctacaacaaccacctctacaagcaaatctccaacgggacatcgggaggagccaccaacgacaacacctacttcggctacagcaccccctgggggtattttgactttaacagattccactgccacttttcaccacgtgactggcagcgactcatcaacaacaactggggattccggcccaagagactcagcttcaagctcttcaacatccaggtcaaggaggtcacgcagaatgaaggcaccaagaccatcgccaataacctcaccagcaccatccaggtgtttacggactcggagtaccagctgccgtacgttctcggctctgcccaccagggctgcctgcctccgttcccggcggacgtgttcatgattccccagtacggctacctaacactcaacaacggtagtcaggccgtgggacgctcctccttctactgcctggaatactttccttcgcagatgctgagaaccggcaacaacttccagtttacttacaccttcgaggacgtgcctttccacagcagctacgcccacagccagagcttggaccggctgatgaatcctctgattgaccagtacctgtactacttgtctcggactcaaacaacaggaggcacggcaaatacgcagactctgggcttcagccaaggtgggcctaatacaatggccaatcaggcaaagaactggctgccaggaccctgttaccgccaacaacgcgtctcaacgacaaccgggcaaaacaacaatagcaactttgcctggactgctgggaccaaataccatctgaatggaagaaattcattggctaatcctggcatcgctatggcaacacacaaagacgacgaggagcgtttttttcccagtaacgggatcctgatttttggcaaacaaaatgctgccagagacaatgcggattacagcgatgtcatgctcaccagcgaggaagaaatcaaaaccactaaccctgtggctacagaggaatacggtatcgtggcagataacttgcagcagcaaaacacggctcctcaaattggaactgtcaacagccagggggccttacccggtatggtctggcagaaccgggacgtgtacctgcagggtcccatctgggccaagattcctcacacggacggcaacttccacccgtctccgctgatgggcggctttggcctgaaacatcctccgcctcagatcctgatcaagaacacgcctgtacctgcggatcctccgaccaccttcaaccagtcaaagctgaactctttcatcacgcaatacagcaccggacaggtcagcgtggaaattgaatgggagctgcagaaggaaaacagcaagcgctggaaccccgagatccagtacacctccaactactacaaatctacaagtgtggactttgctgttaatacagaaggcgtgtactctgaaccccgccccattggcacccgttacctcacccgtaatctgtaattgcctgttaatcaataaaccggttgattcgtttcagttgaactttggtctctgcgaagggcgaattcgtttaaacctgcaggactagaggtcctgtattagaggtcacgtgagtgttttgcgacattttgcgacaccatgtggtcacgctgggtatttaagcccgagtgagcacgcagggtctccattttgaagcgggaggtttgaacgcgcagccgccaagccgaattctgcatcgcgatagggataacagggtaataaataatgtactagagacactttcaataaaggcaaatgcttttatttgtacactctcgggtgattatttacccccacccttgccgtctgcgccgtttaaaaatcaaaggggttctgccgcgcatcgctatgcgccactggcagggacacgttgcgatactggtgtttagtgctccacttaaactcaggcacaaccatccgcggcagctcggtgaagttttcactccacaggctgcgcaccatcaccaacgcgtttagcaggtcgggcgccgatatcttgaagtcgcagttggggcctccgccctgcgcgcgcgagttgcgatacacagggttgcagcactggaacactatcagcgccgggtggtgcacgctggccagcacgctcttgtcggagatcagatccgcgtccaggtcctccgcgttgctcagggcgaacggagtcaactttggtagctgccttcccaaaaagggcgcgtgcccaggctttgagttgcactcgcaccgtagtggcatcaaaaggtgaccgtgcccggtctgggcgttaggatacagcgcctgcataaaagccttgatctgcttaaaagccacctgagcctttgcgccttcagagaagaacatgccgcaagacttgccggaaaactgattggccggacaggccgcgtcgtgcacgcagcaccttgcgtcggtgttggagatctgcaccacatttcggccccaccggttcttcacgatcttggccttgctagactgctccttcagcgcgcgctgcccgttttcgctcgtcacatccatttcaatcacgtgctccttatttatcataatgcttccgtgtagacacttaagctcgccttcgatctcagcgcagcggtgcagccacaacgcgcagcccgtgggctcgtgatgcttgtaggtcacctctgcaaacgactgcaggtacgcctgcaggaatcgccccatcatcgtcacaaaggtcttgttgctggtgaaggtcagctgcaacccgcggtgctcctcgttcagccaggtcttgcatacggccgccagagcttccacttggtcaggcagtagtttgaagttcgcctttagatcgttatccacgtggtacttgtccatcagcgcgcgcgcagcctccatgcccttctcccacgcagacacgatcggcacactcagcgggttcatcaccgtaatttcactttccgcttcgctgggctcttcctcttcctcttgcgtccgcataccacgcgccactgggtcgtcttcattcagccgccgcactgtgcgcttacctcctttgccatgcttgattagcaccggtgggttgctgaaacccaccatttgtagcgccacatcttctctttcttcctcgctgtccacgattacctctggtgatggcgggcgctcgggcttgggagaagggcgcttctttttcttcttgggcgcaatggccaaatccgccgccgaggtcgatggccgcgggctgggtgtgcgcggcaccagcgcgtcttgtgatgagtcttcctcgtcctcggactcgatacgccgcctcatccgcttttttgggggcgcccggggaggcggcggcgacggggacggggacgacacgtcctccatggttgggggacgtcgcgccgcaccgcgtccgcgctcgggggtggtttcgcgctgctcctcttcccgactggccatttccttctcctataggcagaaaaagatcgttgaaactcactccggggctgtggacgtcggcttaccttcgcaaatttgtacctgaggactaccacgcccacgagattaggttctacgaagaccaatcccgcccgcctaatgcggagcttaccgcctgcgtcattacccagggccacattcttggccaattgcaagccatcaacaaagcccgccaagagtttctgctacgaaagggacggggggtttacttggacccccagtccggcgaggagctcaacccaatccccccgccgccgcagccctatcagcagcagccgcgggcccttgcttcccaggatggcacccaaaaagaagctgcagctgccgccgccacccacggacgaggaggaatactgggacagtcaggcagaggaggttttggacgaggaggaggaggacatgatggaagactgggagagcctagacgaggaagcttccgaggtcgaagaggtgtcagacgaaacaccgtcaccctcggtcgcattcccctcgccggcgccccagaaatcggcaaccggttccagcatggctacaacctccgctcctcaggcgccgccggcactgcccgttcgccgacccaaccgtagatgggacaccactggaaccagggccggtaagtccaagcagccgccgccgttagcccaagagcaacaacagcgccaaggctaccgctcatggcgcgggcacaagaacgccatagttgcttgcttgcaagactgtgggggcaacatctccttcgcccgccgctttcttctctaccatcacggcgtggccttcccccgtaacatcctgcattactaccgtcatctctacagcccatactgcaccggcggcagcggcagcaacagcagcggccacacagaagcaaaggcgaccggatagcaagactctgacaaagcccaagaaatccacagcggcggcagcagcaggaggaggagcgctgcgtctggcgcccaacgaacccgtatcgacccgcgagcttagaaacaggatttttcccactctgtatgctatatttcaacagagcaggggccaagaacaagagctgaaaataaaaaacaggtctctgcgatccctcacccgcagctgcctgtatcacaaaagcgaagatcagcttcggcgcacgctggaagacgcggaggctctcttcagtaaatactgcgcgctgactcttaaggactagtttcgcgccctttctcaaatttaagcgcgaaaactacgtcatctccagcggccacacccggcgccagcacctgttgtcagcgccattttttagggcggagtaacttgtatgtgttgggaattgtagttttcttaaaatgggaagtgacgtaacgtgggaaaacggaagtgacgatttgaggaagttgtgggttttttggctttcgtttctgggcgtaggttcgcgtgcggttttctgggtgttttttgtggactttaaccgttacgtcattttttagtcctatatatactcgctctgcacttggcccttttttacactgtgactgattgagctggtgccgtgtcgagtggtgtttttttaataggttttcttttttactggtaaggctgactgttatgactacgtccggcgttccatttggcatgacactacgaccaacacgatctcggttgtctcggcgcactccgtacagtagggatcgtctacctccttttgagacagaaacccgcgctaccatactggaggatcatccgctgctgcccgaatgtaacactttgacaatgcacaacgtgagttacgtgcgaggtcttccctgcagtgtgggatttacgctgattcaggaatgggttgttccctgggatatggttctaacgcgggaggagcttgtaatcctgaggaagtgtatgcacgtgtgcctgtgttgtgccaacattgatatcatgacgagcatgatgatccatggttacgagtcctgggctctccactgtcattgttccagtcccggttccctgcagtgtatagccggcgggcaggttttggccagctggtttaggatggtggtggatggcgccatgtttaatcagaggtttatatggtaccgggaggtggtgaattacaacatgccaaaagaggtaatgtttatgtccagcgtgtttatgaggggtcgccacttaatctacctgcgcttgtggtatgatggccacgtgggttctgtggtccccgccatgagctttggatacagcgccttgcactgtgggattttgaacaatattgtggtgctgtgctgcagttactgtgctgatttaagtgagatcagggtgcgctgctgtgcccggaggacaaggcgccttatgctgcgggcggtgcgaatcatcgctgaggagaccactgccatgttgtattcctgcaggacggagcggcggcggcagcagtttattcgcgcgctgctgcagcaccaccgccctatcctgatgcacgattatgactctacccccatgtaggcgtggacttctccttcgccgcccgttaagcaaccgcaagttggacagcagcctgtggctcagcagctggacagcgacatgaacttaagtgagctgcccggggagtttattaatatcactgatgagcgtttggctcgacaggaaaccgtgtggaatataacacctaagaatatgtctgttacccatgatatgatgctttttaaggccagccggggagaaaggactgtgtactctgtgtgttgggagggaggtggcaggttgaatactagggttctgtgagtttgattaaggtacggtgatctgtataagctatgtggtggtggggctatactactgaatgaaaaatgacttgaaattttctgcaattgaaaaataaacacgttgaaacataacacaaacgattctttattcttgggcaatgtatgaaaaagtgtaagaggatgtggcaaatatttcattaatgtagttgtggccagaccagtcccatgaaaatgacatagagtatgcacttggagttgtgtctcctgtttcctgtgtaccgtttagtgtaatggttagtgttacaggtttagttttgtctccgtttaagtaaacttgactgacaatgttacttttggcagttttaccgtgagattttggataagctgataggttaggcataaatccaacagcgtttgtataggctgtcgcccctcctgacgcggtaggaggaggggagggtgccctgcatgtctgccgctgctcttgctcttgccgctgctgaggaggggggcgcatctgccgcagcaccggatgcatctgggaaaagcaaaaaaggggctcgtccctgtttccggaggaatttgcaagcggggtcttgcatgacggggaggcaaacccccgttcgccgcagtccggccggtccgagactcgaaccgggggtcccgcgactcaacccttggaaaataaccctccggctacagggagcgagccacttaatgctttcgctttccagcctaaccgcttacgctgcgcgcggccagtggccaaaaaagctagcgcagcagccgccgcgcctggaaggaagccaaaaggagcactcccccgttgtctgacgtcgcacacctgggttcgacacgcgggcggtaaccgcatggatcacggcggacggccggatacggggctcgaaccccggtcgtccgccatgatacccttgcgaatttatccaccagaccacggaagagtgcccgcttacaggctctccttttgcacggtctagagcgtcaacgattgcgcgcgcctgaccggccagagcgtcccgaccatggagcactttttgccgctgcgcaacatctggaaccgcgtccgcgactttccgcgcgcctccaccaccgccgccggcatcacctggatgtccaggtacatctacggata

SEQ ID NO: 74 - DNA, 9825 bp, synthetic construct
  source 1..9825: mol_type = other DNA
atgccggggttttacgagattgtgattaaggtccccagcgaccttgacgagcatctgcccggcatttctgacagctttgtgaactgggtggccgagaaggaatgggagttgccgccagattctgacatggatctgaatctgattgagcaggcacccctgaccgtggccgagaagctgcagcgcgactttctgacggaatggcgccgtgtgagtaaggccccggaggctcttttctttgtgcaatttgagaagggagagagctacttccacatgcacgtgctcgtggaaaccaccggggtgaaatccatggttttgggacgtttcctgagtcagattcgcgaaaaactgattcagagaatttaccgcgggatcgagccgactttgccaaactggttcgcggtcacaaagaccagaaatggcgccggaggcgggaacaaggtggtggatgagtgctacatccccaattacttgctccccaaaacccagcctgagctccagtgggcgtggactaatatggaacagtatttaagcgcctgtttgaatctcacggagcgtaaacggttggtggcgcagcatctgacgcacgtgtcgcagacgcaggagcagaacaaagagaatcagaatcccaattctgatgcgccggtgatcagatcaaaaacttcagccaggtacatggagctggtcgggtggctcgtggacaaggggattacctcggagaagcagtggatccaggaggaccaggcctcatacatctccttcaatgcggcctccaactcgcggtcccaaatcaaggctgccttggacaatgcgggaaagattatgagcctgactaaaaccgcccccgactacctggtgggccagcagcccgtggaggacatttccagcaatcggatttataaaattttggaactaaacgggtacgatccccaatatgcggcttccgtctttctgggatgggccacgaaaaagttcggcaagaggaacaccatctggctgtttgggcctgcaactaccgggaagaccaacatcgcggaggccatagcccacactgtgcccttctacgggtgcgtaaactggaccaatgagaactttcccttcaacgactgtgtcgacaagatggtgatctggtgggaggaggggaagatgaccgccaaggtcgtggagtcggccaaagccattctcggaggaagcaaggtgcgcgtggaccagaaatgcaagtcctcggcccagatagacccgactcccgtgatcgtcacctccaacaccaacatgtgcgccgtgattgacgggaactcaacgaccttcgaacaccagcagccgttgcaagaccggatgttcaaatttgaactcacccgccgtctggatcatgactttgggaaggtcaccaagcaggaagtcaaagactttttccggtgggcaaaggatcacgtggttgaggtggagcatgaattctacgtcaaaaagggtggagccaagaaaagacccgcccccagtgacgcagatataagtgagcccaaacgggtgcgcgagtcagttgcgcagccatcgacgtcagacgcggaagcttcgatcaactacgcagacaggtaccaaaacaaatgttctcgtcacgtgggcatgaatctgatgctgtttccctgcagacaatgcgagagaatgaatcagaattcaaatatctgcttcactcacggacagaaagactgtttagagtgctttcccgtgtcagaatctcaacccgtttctgtcgtcaaaaaggcgtatcagaaactgtgctacattcatcatatcatgggaaaggtgccagacgcttgcactgcctgcgatctggtcaatgtggatttggatgactgcatctttgaacaataaatgatttaaatcaggtatggctgccgatggttatcttccagattggctcgaggacaacctctctgagggcattcgcgagtggtgggcgctgaaacctggagccccgaagcccaaagccaaccagcaaaagcaggacgacggccggggtctggtgcttcctggctacaagtacctcggacccttcaacggactcgacaagggggagcccgtcaacgcggcggacgcagcggccctcgagcacgacaaggcctacgaccagcagctgcaggcgggtgacaatccgtacctgcggtataaccacgccgacgccgagtttcaggagcgtctgcaagaagatacgtcttttgggggcaacctcgggcgagcagtcttccaggccaagaagcgggttctcgaacctctcggtctggttgaggaaggcgctaagacggctcctggaaagaagagaccggtagagccatcaccccagcgttctccagactcctctacgggcatcggcaagaaaggccaacagcccgccagaaaaagactcaattttggtcagactggcgactcagagtcagttccagaccctcaacctctcggagaacctccagcagcgccctctggtgtgggacctaatacaatggctgcaggcggtggcgcaccaatggcagacaataacgaaggcgccgacggagtgggtagttcctcgggaaattggcattgcgattccacatggctgggcgacagagtcatcaccaccagcacccgaacctgggccctgcccacctacaacaaccacctctacaagcaaatctccaacgggacatcgggaggagccaccaacgacaacacctacttcggctacagcaccccctgggggtattttgactttaacagattccactgccacttttcaccacgtgactggcagcgactcatcaacaacaactggggattccggcccaagagactcagcttcaagctcttcaacatccaggtcaaggaggtcacgcagaatgaaggcaccaagaccatcgccaataacctcaccagcaccatccaggtgtttacggactcggagtaccagctgccgtacgttctcggctctgcccaccagggctgcctgcctccgttcccggcggacgtgttcatgattccccagtacggctacctaacactcaacaacggtagtcaggccgtgggacgctcctccttctactgcctggaatactttccttcgcagatgctgagaaccggcaacaacttccagtttacttacaccttcgaggacgtgcctttccacagcagctacgcccacagccagagcttggaccggctgatgaatcctctgattgaccagtacctgtactacttgtctcggactcaaacaacaggaggcacggcaaatacgcagactctgggcttcagccaaggtgggcctaatacaatggccaatcaggcaaagaactggctgccaggaccctgttaccgccaacaacgcgtctcaacgacaaccgggcaaaacaacaatagcaactttgcctggactgctgggaccaaataccatctgaatggaagaaattcattggctaatcctggcatcgctatggcaacacacaaagacgacgaggagcgtttttttcccagtaacgggatcctgatttttggcaaacaaaatgctgccagagacaatgcggattacagcgatgtcatgctcaccagcgaggaagaaatcaaaaccactaaccctgtggctacagaggaatacggtatcgtggcagataacttgcagcagcaaaacacggctcctcaaattggaactgtcaacagccagggggccttacccggtatggtctggcagaaccgggacgtgtacctgcagggtcccatctgggccaagattcctcacacggacggcaacttccacccgtctccgctgatgggcggctttggcctgaaacatcctccgcctcagatcctgatcaagaacacgcctgtacctgcggatcctccgaccaccttcaaccagtcaaagctgaactctttcatcacgcaatacagcaccggacaggtcagcgtggaaattgaatgggagctgcagaaggaaaacagcaagcgctggaaccccgagatccagtacacctccaactactacaaatctacaagtgtggactttgctgttaatacagaaggcgtgtactctgaaccccgccccattggcacccgttacctcacccgtaatctgtaattgcctgttaatcaataaaccggttgattcgtttcagttgaactttggtctctgcgaagggcgaattcgtttaaacctgcaggactagagccgaattctgcatcgcgatagggataacagggtaataaataatgtactagagacactttcaataaaggcaaatgcttttatttgtacactctcgggtgattatttacccccacccttgccgtctgcgccgtttaaaaatcaaaggggttctgccgcgcatcgctatgcgccactggcagggacacgttgcgatactggtgtttagtgctccacttaaactcaggcacaaccatccgcggcagctcggtgaagttttcactccacaggctgcgcaccatcaccaacgcgtttagcaggtcgggcgccgatatcttgaagtcgcagttggggcctccgccctgcgcgcgcgagttgcgatacacagggttgcagcactggaacactatcagcgccgggtggtgcacgctggccagcacgctcttgtcggagatcagatccgcgtccaggtcctccgcgttgctcagggcgaacggagtcaactttggtagctgccttcccaaaaagggcgcgtgcccaggctttgagttgcactcgcaccgtagtggcatcaaaaggtgaccgtgcccggtctgggcgttaggatacagcgcctgcataaaagccttgatctgcttaaaagccacctgagcctttgcgccttcagagaagaacatgccgcaagacttgccggaaaactgattggccggacaggccgcgtcgtgcacgcagcaccttgcgtcggtgttggagatctgcaccacatttcggccccaccggttcttcacgatcttggccttgctagactgctccttcagcgcgcgctgcccgttttcgctcgtcacatccatttcaatcacgtgctccttatttatcataatgcttccgtgtagacacttaagctcgccttcgatctcagcgcagcggtgcagccacaacgcgcagcccgtgggctcgtgatgcttgtaggtcacctctgcaaacgactgcaggtacgcctgcaggaatcgccccatcatcgtcacaaaggtcttgttgctggtgaaggtcagctgcaacccgcggtgctcctcgttcagccaggtcttgcatacggccgccagagcttccacttggtcaggcagtagtttgaagttcgcctttagatcgttatccacgtggtacttgtccatcagcgcgcgcgcagcctccatgcccttctcccacgcagacacgatcggcacactcagcgggttcatcaccgtaatttcactttccgcttcgctgggctcttcctcttcctcttgcgtccgcataccacgcgccactgggtcgtcttcattcagccgccgcactgtgcgcttacctcctttgccatgcttgattagcaccggtgggttgctgaaacccaccatttgtagcgccacatcttctctttcttcctcgctgtccacgattacctctggtgatggcgggcgctcgggcttgggagaagggcgcttctttttcttcttgggcgcaatggccaaatccgccgccgaggtcgatggccgcgggctgggtgtgcgcggcaccagcgcgtcttgtgatgagtcttcctcgtcctcggactcgatacgccgcctcatccgcttttttgggggcgcccggggaggcggcggcgacggggacggggacgacacgtcctccatggttgggggacgtcgcgccgcaccgcgtccgcgctcgggggtggtttcgcgctgctcctcttcccgactggccatttccttctcctataggcagaaaaagatcgttgaaactcactccggggctgtggacgtcggcttaccttcgcaaatttgtacctgaggactaccacgcccacgagattaggttctacgaagaccaatcccgcccgcctaatgcggagcttaccgcctgcgtcattacccagggccacattcttggccaattgcaagccatcaacaaagcccgccaagagtttctgctacgaaagggacggggggtttacttggacccccagtccggcgaggagctcaacccaatccccccgccgccgcagccctatcagcagcagccgcgggcccttgcttcccaggatggcacccaaaaagaagctgcagctgccgccgccacccacggacgaggaggaatactgggacagtcaggcagaggaggttttggacgaggaggaggaggacatgatggaagactgggagagcctagacgaggaagcttccgaggtcgaagaggtgtcagacgaaacaccgtcaccctcggtcgcattcccctcgccggcgccccagaaatcggcaaccggttccagcatggctacaacctccgctcctcaggcgccgccggcactgcccgttcgccgacccaaccgtagatgggacaccactggaaccagggccggtaagtccaagcagccgccgccgttagcccaagagcaacaacagcgccaaggctaccgctcatggcgcgggcacaagaacgccatagttgcttgcttgcaagactgtgggggcaacatctccttcgcccgccgctttcttctctaccatcacggcgtggccttcccccgtaacatcctgcattactaccgtcatctctacagcccatactgcaccggcggcagcggcagcaacagcagcggccacacagaagcaaaggcgaccggatagcaagactctgacaaagcccaagaaatccacagcggcggcagcagcaggaggaggagcgctgcgtctggcgcccaacgaacccgtatcgacccgcgagcttagaaacaggatttttcccactctgtatgctatatttcaacagagcaggggccaagaacaagagctgaaaataaaaaacaggtctctgcgatccctcacccgcagctgcctgtatcacaaaagcgaagatcagcttcggcgcacgctggaagacgcggaggctctcttcagtaaatactgcgcgctgactcttaaggactagtttcgcgccctttctcaaatttaagcgcgaaaactacgtcatctccagcggccacacccggcgccagcacctgttgtcagcgccattttttagggcggagtaacttgtatgtgttgggaattgtagttttcttaaaatgggaagtgacgtaacgtgggaaaacggaagtgacgatttgaggaagttgtgggttttttggctttcgtttctgggcgtaggttcgcgtgcggttttctgggtgttttttgtggactttaaccgttacgtcattttttagtcctatatatactcgctctgcacttggcccttttttacactgtgactgattgagctggtgccgtgtcgagtggtgtttttttaataggttttcttttttactggtaaggctgactgttatgactacgtccggcgttccatttggcatgacactacgaccaacacgatctcggttgtctcggcgcactccgtacagtagggatcgtctacctccttttgagacagaaacccgcgctaccatactggaggatcatccgctgctgcccgaatgtaacactttgacaatgcacaacgtgagttacgtgcgaggtcttccctgcagtgtgggatttacgctgattcaggaatgggttgttccctgggatatggttctaacgcgggaggagcttgtaatcctgaggaagtgtatgcacgtgtgcctgtgttgtgccaacattgatatcatgacgagcatgatgatccatggttacgagtcctgggctctccactgtcattgttccagtcccggttccctgcagtgtatagccggcgggcaggttttggccagctggtttaggatggtggtggatggcgccatgtttaatcagaggtttatatggtaccgggaggtggtgaattacaacatgccaaaagaggtaatgtttatgtccagcgtgtttatgaggggtcgccacttaatctacctgcgcttgtggtatgatggccacgtgggttctgtggtccccgccatgagctttggatacagcgccttgcactgtgggattttgaacaatattgtggtgctgtgctgcagttactgtgctgatttaagtgagatcagggtgcgctgctgtgcccggaggacaaggcgccttatgctgcgggcggtgcgaatcatcgctgaggagaccactgccatgttgtattcctgcaggacggagcggcggcggcagcagtttattcgcgcgctgctgcagcaccaccgccctatcctgatgcacgattatgactctacccccatgtaggcgtggacttctccttcgccgcccgttaagcaaccgcaagttggacagcagcctgtggctcagcagctggacagcgacatgaacttaagtgagctgcccggggagtttattaatatcactgatgagcgtttggctcgacaggaaaccgtgtggaatataacacctaagaatatgtctgttacccatgatatgatgctttttaaggccagccggggagaaaggactgtgtactctgtgtgttgggagggaggtggcaggttgaatactagggttctgtgagtttgattaaggtacggtgatctgtataagctatgtggtggtggggctatactactgaatgaaaaatgacttgaaattttctgcaattgaaaaataaacacgttgaaacataacacaaacgattctttattcttgggcaatgtatgaaaaagtgtaagaggatgtggcaaatatttcattaatgtagttgtggccagaccagtcccatgaaaatgacatagagtatgcacttggagttgtgtctcctgtttcctgtgtaccgtttagtgtaatggttagtgttacaggtttagttttgtctccgtttaagtaaacttgactgacaatgttacttttggcagttttaccgtgagattttggataagctgataggttaggcataaatccaacagcgtttgtataggctgtcgcccctcctgacgcggtaggaggaggggagggtgccctgcatgtctgccgctgctcttgctcttgccgctgctgaggaggggggcgcatctgccgcagcaccggatgcatctgggaaaagcaaaaaaggggctcgtccctgtttccggaggaatttgcaagcggggtcttgcatgacggggaggcaaacccccgttcgccgcagtccggccggtccgagactcgaaccgggggtcccgcgactcaacccttggaaaataaccctccggctacagggagcgagccacttaatgctttcgctttccagcctaaccgcttacgctgcgcgcggccagtggccaaaaaagctagcgcagcagccgccgcgcctggaaggaagccaaaaggagcactcccccgttgtctgacgtcgcacacctgggttcgacacgcgggcggtaaccgcatggatcacggcggacggccggatacggggctcgaaccccggtcgtccgccatgatacccttgcgaatttatccaccagaccacggaagagtgcccgcttacaggctctccttttgcacggtctagagcgtcaacgattgcgcgcgcctgaccggccagagcgtcccgaccatggagcactttttgccgctgcgcaacatctggaaccgcgtccgcgactttccgcgcgcctccaccaccgccgccggcatcacctggatgtccaggtacatctacggata

SEQ ID NO: 75 - DNA, 9958 bp, synthetic construct
  source 1..9958: mol_type = other DNA
atgccggggttttacgagattgtgattaaggtccccagcgaccttgacgagcatctgcccggcatttctgacagctttgtgaactgggtggccgagaaggaatgggagttgccgccagattctgacatggatctgaatctgattgagcaggcacccctgaccgtggccgagaagctgcagcgcgactttctgacggaatggcgccgtgtgagtaaggccccggaggctcttttctttgtgcaatttgagaagggagagagctacttccacatgcacgtgctcgtggaaaccaccggggtgaaatccatggttttgggacgtttcctgagtcagattcgcgaaaaactgattcagagaatttaccgcgggatcgagccgactttgccaaactggttcgcggtcacaaagaccagaaatggcgccggaggcgggaacaaggtggtggatgagtgctacatccccaattacttgctccccaaaacccagcctgagctccagtgggcgtggactaatatggaacagtatttaagcgcctgtttgaatctcacggagcgtaaacggttggtggcgcagcatctgacgcacgtgtcgcagacgcaggagcagaacaaagagaatcagaatcccaattctgatgcgccggtgatcagatcaaaaacttcagccaggtacatggagctggtcgggtggctcgtggacaaggggattacctcggagaagcagtggatccaggaggaccaggcctcatacatctccttcaatgcggcctccaactcgcggtcccaaatcaaggctgccttggacaatgcgggaaagattatgagcctgactaaaaccgcccccgactacctggtgggccagcagcccgtggaggacatttccagcaatcggatttataaaattttggaactaaacgggtacgatccccaatatgcggcttccgtctttctgggatgggccacgaaaaagttcggcaagaggaacaccatctggctgtttgggcctgcaactaccgggaagaccaacatcgcggaggccatagcccacactgtgcccttctacgggtgcgtaaactggaccaatgagaactttcccttcaacgactgtgtcgacaagatggtgatctggtgggaggaggggaagatgaccgccaaggtcgtggagtcggccaaagccattctcggaggaagcaaggtgcgcgtggaccagaaatgcaagtcctcggcccagatagacccgactcccgtgatcgtcacctccaacaccaacatgtgcgccgtgattgacgggaactcaacgaccttcgaacaccagcagccgttgcaagaccggatgttcaaatttgaactcacccgccgtctggatcatgactttgggaaggtcaccaagcaggaagtcaaagactttttccggtgggcaaaggatcacgtggttgaggtggagcatgaattctacgtcaaaaagggtggagccaagaaaagacccgcccccagtgacgcagatataagtgagcccaaacgggtgcgcgagtcagttgcgcagccatcgacgtcagacgcggaagcttcgatcaactacgcagacaggtaccaaaacaaatgttctcgtcacgtgggcatgaatctgatgctgtttccctgcagacaatgcgagagaatgaatcagaattcaaatatctgcttcactcacggacagaaagactgtttagagtgctttcccgtgtcagaatctcaacccgtttctgtcgtcaaaaaggcgtatcagaaactgtgctacattcatcatatcatgggaaaggtgccagacgcttgcactgcctgcgatctggtcaatgtggatttggatgactgcatctttgaacaataaatgatttaaatcaggtatggctgccgatggttatcttccagattggctcgaggacaacctctctgagggcattcgcgagtggtgggcgctgaaacctggagccccgaagcccaaagccaaccagcaaaagcaggacgacggccggggtctggtgcttcctggctacaagtacctcggacccttcaacggactcgacaagggggagcccgtcaacgcggcggacgcagcggccctcgagcacgacaaggcctacgaccagcagctgcaggcgggtgacaatccgtacctgcggtataaccacgccgacgccgagtttcaggagcgtctgcaagaagatacgtcttttgggggcaacctcgggcgagcagtcttccaggccaagaagcgggttctcgaacctctcggtctggttgaggaaggcgctaagacggctcctggaaagaagagaccggtagagccatcaccccagcgttctccagactcctctacgggcatcggcaagaaaggccaacagcccgccagaaaaagactcaattttggtcagactggcgactcagagtcagttccagaccctcaacctctcggagaacctccagcagcgccctctggtgtgggacctaatacaatggctgcaggcggtggcgcaccaatggcagacaataacgaaggcgccgacggagtgggtagttcctcgggaaattggcattgcgattccacatggctgggcgacagagtcatcaccaccagcacccgaacctgggccctgcccacctacaacaaccacctctacaagcaaatctccaacgggacatcgggaggagccaccaacgacaacacctacttcggctacagcaccccctgggggtattttgactttaacagattccactgccacttttcaccacgtgactggcagcgactcatcaacaacaactggggattccggcccaagagactcagcttcaagctcttcaacatccaggtcaaggaggtcacgcagaatgaaggcaccaagaccatcgccaataacctcaccagcaccatccaggtgtttacggactcggagtaccagctgccgtacgttctcggctctgcccaccagggctgcctgcctccgttcccggcggacgtgttcatgattccccagtacggctacctaacactcaacaacggtagtcaggccgtgggacgctcctccttctactgcctggaatactttccttcgcagatgctgagaaccggcaacaacttccagtttacttacaccttcgaggacgtgcctttccacagcagctacgcccacagccagagcttggaccggctgatgaatcctctgattgaccagtacctgtactacttgtctcggactcaaacaacaggaggcacggcaaatacgcagactctgggcttcagccaaggtgggcctaatacaatggccaatcaggcaaagaactggctgccaggaccctgttaccgccaacaacgcgtctcaacgacaaccgggcaaaacaacaatagcaactttgcctggactgctgggaccaaataccatctgaatggaagaaattcattggctaatcctggcatcgctatggcaacacacaaagacgacgaggagcgtttttttcccagtaacgggatcctgatttttggcaaacaaaatgctgccagagacaatgcggattacagcgatgtcatgctcaccagcgaggaagaaatcaaaaccactaaccctgtggctacagaggaatacggtatcgtggcagataacttgcagcagcaaaacacggctcctcaaattggaactgtcaacagccagggggccttacccggtatggtctggcagaaccgggacgtgtacctgcagggtcccatctgggccaagattcctcacacggacggcaacttccacccgtctccgctgatgggcggctttggcctgaaacatcctccgcctcagatcctgatcaagaacacgcctgtacctgcggatcctccgaccaccttcaaccagtcaaagctgaactctttcatcacgcaatacagcaccggacaggtcagcgtggaaattgaatgggagctgcagaaggaaaacagcaagcgctggaaccccgagatccagtacacctccaactactacaaatctacaagtgtggactttgctgttaatacagaaggcgtgtactctgaaccccgccccattggcacccgttacctcacccgtaatctgtaattgcctgttaatcaataaaccggttgattcgtttcagttgaactttggtctctgcgaagggcgaattcgtttaaacctgcaggactagagccgaattctgcatcgcgatagggataacagggtaataaataatgtactagagacactttcaataaaggcaaatgcttttatttgtacactctcgggtgattatttacccccacccttgccgtctgcgccgtttaaaaatcaaaggggttctgccgcgcatcgctatgcgccactggcagggacacgttgcgatactggtgtttagtgctccacttaaactcaggcacaaccatccgcggcagctcggtgaagttttcactccacaggctgcgcaccatcaccaacgcgtttagcaggtcgggcgccgatatcttgaagtcgcagttggggcctccgccctgcgcgcgcgagttgcgatacacagggttgcagcactggaacactatcagcgccgggtggtgcacgctggccagcacgctcttgtcggagatcagatccgcgtccaggtcctccgcgttgctcagggcgaacggagtcaactttggtagctgccttcccaaaaagggcgcgtgcccaggctttgagttgcactcgcaccgtagtggcatcaaaaggtgaccgtgcccggtctgggcgttaggatacagcgcctgcataaaagccttgatctgcttaaaagccacctgagcctttgcgccttcagagaagaacatgccgcaagacttgccggaaaactgattggccggacaggccgcgtcgtgcacgcagcaccttgcgtcggtgttggagatctgcaccacatttcggccccaccggttcttcacgatcttggccttgctagactgctccttcagcgcgcgctgcccgttttcgctcgtcacatccatttcaatcacgtgctccttatttatcataatgcttccgtgtagacacttaagctcgccttcgatctcagcgcagcggtgcagccacaacgcgcagcccgtgggctcgtgatgcttgtaggtcacctctgcaaacgactgcaggtacgcctgcaggaatcgccccatcatcgtcacaaaggtcttgttgctggtgaaggtcagctgcaacccgcggtgctcctcgttcagccaggtcttgcatacggccgccagagcttccacttggtcaggcagtagtttgaagttcgcctttagatcgttatccacgtggtacttgtccatcagcgcgcgcgcagcctccatgcccttctcccacgcagacacgatcggcacactcagcgggttcatcaccgtaatttcactttccgcttcgctgggctcttcctcttcctcttgcgtccgcataccacgcgccactgggtcgtcttcattcagccgccgcactgtgcgcttacctcctttgccatgcttgattagcaccggtgggttgctgaaacccaccatttgtagcgccacatcttctctttcttcctcgctgtccacgattacctctggtgatggcgggcgctcgggcttgggagaagggcgcttctttttcttcttgggcgcaatggccaaatccgccgccgaggtcgatggccgcgggctgggtgtgcgcggcaccagcgcgtcttgtgatgagtcttcctcgtcctcggactcgatacgccgcctcatccgcttttttgggggcgcccggggaggcggcggcgacggggacggggacgacacgtcctccatggttgggggacgtcgcgccgcaccgcgtccgcgctcgggggtggtttcgcgctgctcctcttcccgactggccatttccttctcctataggcagaaaaagatcgttgaaactcactccggggctgtggacgtcggcttaccttcgcaaatttgtacctgaggactaccacgcccacgagattaggttctacgaagaccaatcccgcccgcctaatgcggagcttaccgcctgcgtcattacccagggccacattcttggccaattgcaagccatcaacaaagcccgccaagagtttctgctacgaaagggacggggggtttacttggacccccagtccggcgaggagctcaacccaatccccccgccgccgcagccctatcagcagcagccgcgggcccttgcttcccaggatggcacccaaaaagaagctgcagctgccgccgccacccacggacgaggaggaatactgggacagtcaggcagaggaggttttggacgaggaggaggaggacatgatggaagactgggagagcctagacgaggaagcttccgaggtcgaagaggtgtcagacgaaacaccgtcaccctcggtcgcattcccctcgccggcgccccagaaatcggcaaccggttccagcatggctacaacctccgctcctcaggcgccgccggcactgcccgttcgccgacccaaccgtagatgggacaccactggaaccagggccggtaagtccaagcagccgccgccgttagcccaagagcaacaacagcgccaaggctaccgctcatggcgcgggcacaagaacgccatagttgcttgcttgcaagactgtgggggcaacatctccttcgcccgccgctttcttctctaccatcacggcgtggccttcccccgtaacatcctgcattactaccgtcatctctacagcccatactgcaccggcggcagcggcagcaacagcagcggccacacagaagcaaaggcgaccggatagcaagactctgacaaagcccaagaaatccacagcggcggcagcagcaggaggaggagcgctgcgtctggcgcccaacgaacccgtatcgacccgcgagcttagaaacaggatttttcccactctgtatgctatatttcaacagagcaggggccaagaacaagagctgaaaataaaaaacaggtctctgcgatccctcacccgcagctgcctgtatcacaaaagcgaagatcagcttcggcgcacgctggaagacgcggaggctctcttcagtaaatactgcgcgctgactcttaaggactagtttcgcgccctttctcaaatttaagcgcgaaaactacgtcatctccagcggccacacccggcgccagcacctgttgtcagcgccattttttagggcggagtaacttgtatgtgttgggaattgtagttttcttaaaatgggaagtgacgtaacgtgggaaaacggaagtgacgatttgaggaagttgtgggttttttggctttcgtttctgggcgtaggttcgcgtgcggttttctgggtgttttttgtggactttaaccgttacgtcattttttagtcctatatatactcgctctgcacttggcccttttttacactgtgactgattgagctggtgccgtgtcgagtggtgtttttttaataggttttcttttttactggtaaggctgactgttatgactacgtccggcgttccatttggcatgacactacgaccaacacgatctcggttgtctcggcgcactccgtacagtagggatcgtctacctccttttgagacagaaacccgcgctaccatactggaggatcatccgctgctgcccgaatgtaacactttgacaatgcacaacgtgagttacgtgcgaggtcttccctgcagtgtgggatttacgctgattcaggaatgggttgttccctgggatatggttctaacgcgggaggagcttgtaatcctgaggaagtgtatgcacgtgtgcctgtgttgtgccaacattgatatcatgacgagcatgatgatccatggttacgagtcctgggctctccactgtcattgttccagtcccggttccctgcagtgtatagccggcgggcaggttttggccagctggtttaggatggtggtggatggcgccatgtttaatcagaggtttatatggtaccgggaggtggtgaattacaacatgccaaaagaggtaatgtttatgtccagcgtgtttatgaggggtcgccacttaatctacctgcgcttgtggtatgatggccacgtgggttctgtggtccccgccatgagctttggatacagcgccttgcactgtgggattttgaacaatattgtggtgctgtgctgcagttactgtgctgatttaagtgagatcagggtgcgctgctgtgcccggaggacaaggcgccttatgctgcgggcggtgcgaatcatcgctgaggagaccactgccatgttgtattcctgcaggacggagcggcggcggcagcagtttattcgcgcgctgctgcagcaccaccgccctatcctgatgcacgattatgactctacccccatgtaggcgtggacttctccttcgccgcccgttaagcaaccgcaagttggacagcagcctgtggctcagcagctggacagcgacatgaacttaagtgagctgcccggggagtttattaatatcactgatgagcgtttggctcgacaggaaaccgtgtggaatataacacctaagaatatgtctgttacccatgatatgatgctttttaaggccagccggggagaaaggactgtgtactctgtgtgttgggagggaggtggcaggttgaatactagggttctgtgagtttgattaaggtacggtgatctgtataagctatgtggtggtggggctatactactgaatgaaaaatgacttgaaattttctgcaattgaaaaataaacacgttgaaacataacacaaacgattctttattcttgggcaatgtatgaaaaagtgtaagaggatgtggcaaatatttcattaatgtagttgtggccagaccagtcccatgaaaatgacatagagtaaggtcctgtattagaggtcacgtgagtgttttgcgacattttgcgacaccatgtggtcacgctgggtatttaagcccgagtgagcacgcagggtctccattttgaagcgggaggtttgaacgcgcagccgccatgcacttggagttgtgtctcctgtttcctgtgtaccgtttagtgtaatggttagtgttacaggtttagttttgtctccgtttaagtaaacttgactgacaatgttacttttggcagttttaccgtgagattttggataagctgataggttaggcataaatccaacagcgtttgtataggctgtcgcccctcctgacgcggtaggaggaggggagggtgccctgcatgtctgccgctgctcttgctcttgccgctgctgaggaggggggcgcatctgccgcagcaccggatgcatctgggaaaagcaaaaaaggggctcgtccctgtttccggaggaatttgcaagcggggtcttgcatgacggggaggcaaacccccgttcgccgcagtccggccggtccgagactcgaaccgggggtcccgcgactcaacccttggaaaataaccctccggctacagggagcgagccacttaatgctttcgctttccagcctaaccgcttacgctgcgcgcggccagtggccaaaaaagctagcgcagcagccgccgcgcctggaaggaagccaaaaggagcactcccccgttgtctgacgtcgcacacctgggttcgacacgcgggcggtaaccgcatggatcacggcggacggccggatacggggctcgaaccccggtcgtccgccatgatacccttgcgaatttatccaccagaccacggaagagtgcccgcttacaggctctccttttgcacggtctagagcgtcaacgattgcgcgcgcctgaccggccagagcgtcccgaccatggagcactttttgccgctgcgcaacatctggaaccgcgtccgcgactttccgcgcgcctccaccaccgccgccggcatcacctggatgtccaggtacatctacggata

SEQ ID NO: 76 - DNA, 9825 bp, synthetic construct; identical to SEQ ID NO: 74
  source 1..9825: mol_type = other DNA

SEQ ID NO: 77 - DNA, 9825 bp, synthetic construct
  source 1..9825: mol_type = other DNA
atgccggggttttacgagattgtgattaaggtccccagcgaccttgacgagcatctgcccggcatttctgacagctttgtgaactgggtggccgagaaggaatgggagttgccgccagattctgacatggatctgaatctgattgagcaggcacccctgaccgtggccgagaagctgcagcgcgactttctgacggaatggcgccgtgtgagtaaggccccggaggctcttttctttgtgcaatttgagaagggagagagctacttccacatgcacgtgctcgtggaaaccaccggggtgaaatccatggttttgggacgtttcctgagtcagattcgcgaaaaactgattcagagaatttaccgcgggatcgagccgactttgccaaactggttcgcggtcacaaagaccagaaatggcgccggaggcgggaacaaggtggtggatgagtgctacatccccaattacttgctccccaaaacccagcctgagctccagtgggcgtggactaatatggaacagtatttaagcgcctgtttgaatctcacggagcgtaaacggttggtggcgcagcatctgacgcacgtgtcgcagacgcaggagcagaacaaagagaatcagaatcccaattctgatgcgccggtgatcagatcaaaaacttcagccaggtacatggagctggtcgggtggctcgtggacaaggggattacctcggagaagcagtggatccaggaggaccaggcctcatacatctccttcaatgcggcctccaactcgcggtcccaaatcaaggctgccttggacaatgcgggaaagattatgagcctgactaaaaccgcccccgactacctggtgggccagcagcccgtggaggacatttccagcaatcggatttataaaattttggaactaaacgggtacgatccccaatatgcggcttccgtctttctgggatgggccacgaaaaagttcggcaagaggaacaccatctggctgtttgggcctgcaactaccgggaagaccaacatcgcggaggccatagcccacactgtgcccttctacgggtgcgtaaactggaccaatgagaactttcccttcaacgactgtgtcgacaagatggtgatctggtgggaggaggggaagatgaccgccaaggtcgtggagtcggccaaagccattctcggaggaagcaaggtgcgcgtggaccagaaatgcaagtcctcggcccagatagacccgactcccgtgatcgtcacctccaacaccaacatgtgcgccgtgattgacgggaactcaacgaccttcgaacaccagcagccgttgcaagaccggatgttcaaatttgaactcacccgccgtctggatcatgactttgggaaggtcaccaagcaggaagtcaaagactttttccggtgggcaaaggatcacgtggttgaggtggagcatgaattctacgtcaaaaagggtggagccaagaaaagacccgcccccagtgacgcagatataagtgagcccaaacgggtgcgcgagtcagttgcgcagccatcgacgtcagacgcggaagcttcgatcaactacgcagacaggtaccaaaacaaatgttctcgtcacgtgggcatgaatctgatgctgtttccctgcagacaatgcgagagaatgaatcagaattcaaatatctgcttcactcacggacagaaagactgtttagagtgctttcccgtgtcagaatctcaacccgtttctgtcgtcaaaaaggcgtatcagaaactgtgctacattcatcatatcatgggaaaggtgccagacgcttgcactgcctgcgatctggtcaatgtggatttggatgactgcatctttgaacaataaatgatttaaatcaggtatggctgccgatggttatcttccagattggctcgaggacaacctctctgagggcattcgcgagtggtgggcgctgaaacctggagccccgaagcccaaagccaaccagcaaaagcaggacgacggccggggtctggtgcttcctggctacaagtacctcggacccttcaacggactcgacaagggggagcccgtcaacgcggcggacgcagcggccctcgagcacgacaaggcctacgaccagcagctgcaggcgggtgacaatccgtacctgcggtataaccacgccgacgccgagtttcaggagcgtctgcaagaagatacgtcttttgggggcaacctcgggcgagcagtcttccaggccaagaagcgggttctcgaacctctcggtctggttgaggaaggcgctaagacggctcctggaaagaagagaccggtagagccatcaccccagcgttctccagactcctctacgggcatcggcaagaaaggccaacagcccgccagaaaaagactcaattttggtcagactggcgactcagagtcagttccagaccctcaacctctcggagaacctccagcagcgccctctggtgtgggacctaatacaatggctgcaggcggtggcgcaccaatggcagacaataacgaaggcgccgacggagtgggtagttcctcgggaaattggcattgcgattccacatggctgggcgacagagtcatcaccaccagcacccgaacctgggccctgcccacctacaacaaccacctctacaagcaaatctccaacgggacatcgggaggagccaccaacgacaacacctacttcggctacagcaccccctgggggtattttgactttaacagattccactgccacttttcaccacgtgactggcagcgactcatcaacaacaactggggattccggcccaagagactcagcttcaagctcttcaacatccaggtcaaggaggtcacgcagaatgaaggcaccaagaccatcgccaataacctcaccagcaccatccaggtgtttacggactcggagtaccagctgccgtacgttctcggctctgcccaccagggctgcctgcctccgttcccggcggacgtgttcatgattccccagtacggctacctaacactcaacaacggtagtcaggccgtgggacgctcctccttctactgcctggaatactttccttcgcagatgctgagaaccggcaacaacttccagtttacttacaccttcgaggacgtgcctttccacagcagctacgcccacagccagagcttggaccggctgatgaatcctctgattgaccagtacctgtactacttgtctcggactcaaacaacaggaggcacggcaaatacgcagactctgggcttcagccaaggtgggcctaatacaatggccaatcaggcaaagaactggctgccaggaccctgttaccgccaacaacgcgtctcaacgacaaccgggcaaaacaacaatagcaactttgcctggactgctgggaccaaataccatctgaatggaagaaattcattggctaatcctggcatcgctatggcaacacacaaagacgacgaggagcgtttttttcccagtaacgggatcctgatttttggcaaacaaaatgctgccagagacaatgcggattacagcgatgtcatgctcaccagcgaggaagaaatcaaaaccactaaccctgtggctacagaggaatacggtatcgtggcagataacttgcagcagcaaaacacggctcctcaaattggaactgtcaacagccagggggccttacccggtatggtctggcagaaccgggacgtgtacctgcagggtcccatctgggccaagattcctcacacggacggcaacttccacccgtctccgctgatgggcggctttggcctgaaacatcctccgcctcagatcctgatcaagaacacgcctgtacctgcggatcctccgaccaccttcaaccagtcaaagctgaactctttcatcacgcaatacagcaccggacaggtcagcgtggaaattgaatgggagctgcagaaggaaaacagcaagcgctggaaccccgagatccagtacacctccaactactacaaatctacaagtgtggactttgctgttaatacagaaggcgtgtactctgaaccccgccccattggcacccgttacctcacccgtaatctgtaattgcctgttaatcaataaaccggttgattcgtttcagttgaactttggtctctgcgaagggcgaattcgtttaaacctgcaggactagagccgaattctgcatcgcgatagggataacagggtaataaataatgtactagagacactttcaataaaggcaaatgcttttatttgtacactctcgggtgattatttacccccacccttgccgtctgcgccgttcagaagtcgaaggggttctgtctggcatcggaatgggccacgggcagagacacgttccggtactggtgcttggtggaccacttgaactcaggcacgaccattctaggcagctctgtgaagttctcgctccacaggctccgcaccatcaccagggcgttcagcaggtcaggggcgctgattttgaagtcgcagttaggtccgccgccctgggctctgctgtttctgtacacagggttgcagcactggaacacaataagagcagggtggtgcacgctggccagcacagacttgtcgctgatcaggtcggcgtcgagatcctcggcgttagacaaggcaaaaggggtcagcttgggcagctggcggcccaggaaaggggcgtggccgggcttgctattgcactcgcatctcagaggcatcagcaggtggccgtggccggtctgggcgttggggtacagggcctgcataaaggccttgatctgtttgaaggccacttgggccttggcgccttcggagaagaacatgccgcagcttttgccgctgaactggttggcggggcaggcggcgtcgtgcacacaacaccgggcgtcggtattgctgatctgcaccacgtttctgccccatctgttcttcacgatcttggccttgctgctctgctctttcagggccctctggccgttctcagaggtgacgtccatctcgatcacatgttccttgttgatcatgatgctgccgtgcagacacttcagctcgccctcgatttccgcgcatctgtgcagccacagggcacaaccggtaggctcgtggtgcttgtatgtcacctcagcaaaagattgcaggtaggcttgcaggaatctgcccatcatggtcacgaaggtcttgttggaggtaaaagtcagctgcagtcctctgtgttcctcgttcagccatgtcttgcacacggcggccagagcctcgacctgatctggcagcagcttgaaattagccttcaggtcgttgtccacgtgatacttatccatcagtgctctggcggcttccatgcccttctcccaggcggaaacgatgggcacgctcagggggttcatcacggtgatctcgctttcagcttctgaaggttcctcctcttcctcctgtgttctcatgccccgagccacggggtcgtcctcattcagtctccgcacggttctttttcctccctttccgtgcttaatcagtacaggaggattagagaagcccaccatctggagggcgacgtcctccctttcttcttcgctatccacgatcacttctgggctggggggccgttcaggctttgggctaggccgtttttttttcttcttaggggcgatagccagatcagcggcgcttgtagagggccgaggactaggggttctaggcacgagggcgtcctggctgctgtcctcctcatcctcgctctcgatccgtctccgcattctcttcttagggggggcccgcggagggggagggctagggctaggggacgacacatcttccatggttggaggtctgcgagcagcgcctctgcctctctctggtgttgtctcgcgctgttcttcctctctagaggccatttccttctcctataggcagaaaaagatcgttgaaactcactccggggctgtggacgtcggcttaccttcgcaaatttgtacctgaggactaccacgcccacgagattaggttctacgaagaccaatcccgcccgcctaatgcggagcttaccgcctgcgtcattacccagggccacattcttggccaattgcaagccatcaacaaagcccgccaagagtttctgctacgaaagggacggggggtttacttggacccccagtccggcgaggagctcaacccaatccccccgccgccgcagccctatcagcagcagccgcgggcccttgcttcccaggatggcacccaaaaagaagctgcagctgccgccgccacccacggacgaggaggaatactgggacagtcaggcagaggaggttttggacgaggaggaggaggacatgatggaagactgggagagcctagacgaggaagcttccgaggtcgaagaggtgtcagacgaaacaccgtcaccctcggtcgcattcccctcgccggcgccccagaaatcggcaaccggttccagcatggctacaacctccgctcctcaggcgccgccggcactgcccgttcgccgacccaaccgtagatgggacaccactggaaccagggccggtaagtccaagcagccgccgccgttagcccaagagcaacaacagcgccaaggctaccgctcatggcgcgggcacaagaacgccatagttgcttgcttgcaagactgtgggggcaacatctccttcgcccgccgctttcttctctaccatcacggcgtggccttcccccgtaacatcctgcattactaccgtcatctctacagcccatactgcaccggcggcagcggcagcaacagcagcggccacacagaagcaaaggcgaccggatagcaagactctgacaaagcccaagaaatccacagcggcggcagcagcaggaggaggagcgctgcgtctggcgcccaacgaacccgtatcgacccgcgagcttagaaacaggatttttcccactctgtatgctatatttcaacagagcaggggccaagaacaagagctgaaaataaaaaacaggtctctgcgatccctcacccgcagctgcctgtatcacaaaagcgaagatcagcttcggcgcacgctggaagacgcggaggctctcttcagtaaatactgcgcgctgactcttaaggactagtttcgcgccctttctcaaatttaagcgcgaaaactacgtcatctccagcggccacacccggcgccagcacctgttgtcagcgccattttttagggcggagtaacttgtatgtgttgggaattgtagttttcttaaaatgggaagtgacgtaacgtgggaaaacggaagtgacgatttgaggaagttgtgggttttttggctttcgtttctgggcgtaggttcgcgtgcggttttctgggtgttttttgtggactttaaccgttacgtcattttttagtcctatatatactcgctctgcacttggcccttttttacactgtgactgattgagctggtgccgtgtcgagtggtgtttttttaataggttttcttttttactggtaaggctgactgttatgactacgtccggcgttccatttggcatgacactacgaccaacacgatctcggttgtctcggcgcactccgtacagtagggatcgtctacctccttttgagacagaaacccgcgctaccatactggaggatcatccgctgctgcccgaatgtaacactttgacaatgcacaacgtgagttacgtgcgaggtcttccctgcagtgtgggatttacgctgattcaggaatgggttgttccctgggatatggttctaacgcgggaggagcttgtaatcctgaggaagtgtatgcacgtgtgcctgtgttgtgccaacattgatatcatgacgagcatgatgatccatggttacgagtcctgggctctccactgtcattgttccagtcccggttccctgcagtgtatagccggcgggcaggttttggccagctggtttaggatggtggtggatggcgccatgtttaatcagaggtttatatggtaccgggaggtggtgaattacaacatgccaaaagaggtaatgtttatgtccagcgtgtttatgaggggtcgccacttaatctacctgcgcttgtggtatgatggccacgtgggttctgtggtccccgccatgagctttggatacagcgccttgcactgtgggattttgaacaatattgtggtgctgtgctgcagttactgtgctgatttaagtgagatcagggtgcgctgctgtgcccggaggacaaggcgccttatgctgcgggcggtgcgaatcatcgctgaggagaccactgccatgttgtattcctgcaggacggagcggcggcggcagcagtttattcgcgcgctgctgcagcaccaccgccctatcctgatgcacgattatgactctacccccatgtaggcgtggacttctccttcgccgcccgttaagcaaccgcaagttggacagcagcctgtggctcagcagctggacagcgacatgaacttaagtgagctgcccggggagtttattaatatcactgatgagcgtttggctcgacaggaaaccgtgtggaatataacacctaagaatatgtctgttacccatgatatgatgctttttaaggccagccggggagaaaggactgtgtactctgtgtgttgggagggaggtggcaggttgaatactagggttctgtgagtttgattaaggtacggtgatctgtataagctatgtggtggtggggctatactactgaatgaaaaatgacttgaaattttctgcaattgaaaaataaacacgttgaaacataacacaaacgattctttattcttgggcaatgtatgaaaaagtgtaagaggatgtggcaaatatttcattaatgtagttgtggccagaccagtcccatgaaaatgacatagagtatgcacttggagttgtgtctcctgtttcctgtgtaccgtttagtgtaatggttagtgttacaggtttagttttgtctccgtttaagtaaacttgactgacaatgttacttttggcagttttaccgtgagattttggataagctgataggttaggcataaatccaacagcgtttgtataggctgtcgcccctcctgacgcggtaggaggaggggagggtgccctgcatgtctgccgctgctcttgctcttgccgctgctgaggaggggggcgcatctgccgcagcaccggatgcatctgggaaaagcaaaaaaggggctcgtccctgtttccggaggaatttgcaagcggggtcttgcatgacggggaggcaaacccccgttcgccgcagtccggccggtccgagactcgaaccgggggtcccgcgactcaacccttggaaaataaccctccggctacagggagcgagccacttaatgctttcgctttccagcctaaccgcttacgctgcgcgcggccagtggccaaaaaagctagcgcagcagccgccgcgcctggaaggaagccaaaaggagcactcccccgttgtctgacgtcgcacacctgggttcgacacgcgggcggtaaccgcatggatcacggcggacggccggatacggggctcgaaccccggtcgtccgccatgatacccttgcgaatttatccaccagaccacggaagagtgcccgcttacaggctctccttttgcacggtctagagcgtcaacgattgcgcgcgcctgaccggccagagcgtcccgaccatggagcactttttgccgctgcgcaacatctggaaccgcgtccgcgactttccgcgcgcctccaccaccgccgccggcatcacctggatgtccaggtacatctacggata

SEQ ID NO: 78 - DNA, 9819 bp, synthetic construct
  source 1..9819: mol_type = other DNA
atgccggggttttacgagattgtgattaaggtccccagcgaccttgacgagcatctgcccggcatttctgacagctttgtgaactgggtggccgagaaggaatgggagttgccgccagattctgacatggatctgaatctgattgagcaggcacccctgaccgtggccgagaagctgcagcgcgactttctgacggaatggcgccgtgtgagtaaggccccggaggctcttttctttgtgcaatttgagaagggagagagctacttccacatgcacgtgctcgtggaaaccaccggggtgaaatccatggttttgggacgtttcctgagtcagattcgcgaaaaactgattcagagaatttaccgcgggatcgagccgactttgccaaactggttcgcggtcacaaagaccagaaatggcgccggaggcgggaacaaggtggtggatgagtgctacatccccaattacttgctccccaaaacccagcctgagctccagtgggcgtggactaatatggaacagtatttaagcgcctgtttgaatctcacggagcgtaaacggttggtggcgcagcatctgacgcacgtgtcgcagacgcaggagcagaacaaagagaatcagaatcccaattctgatgcgccggtgatcagatcaaaaacttcagccaggtacatggagctggtcgggtggctcgtggacaaggggattacctcggagaagcagtggatccaggaggaccaggcctcatacatctccttcaatgcggcctccaactcgcggtcccaaatcaaggctgccttggacaatgcgggaaagattatgagcctgactaaaaccgcccccgactacctggtgggccagcagcccgtggaggacatttccagcaatcggatttataaaattttggaactaaacgggtacgatccccaatatgcggcttccgtctttctgggatgggccacgaaaaagttcggcaagaggaacaccatctggctgtttgggcctgcaactaccgggaagaccaacatcgcggaggccatagcccacactgtgcccttctacgggtgcgtaaactggaccaatgagaactttcccttcaacgactgtgtcgacaagatggtgatctggtgggaggaggggaagatgaccgccaaggtcgtggagtcggccaaagccattctcggaggaagcaaggtgcgcgtggaccagaaatgcaagtcctcggcccagatagacccgactcccgtgatcgtcacctccaacaccaacatgtgcgccgtgattgacgggaactcaacgaccttcgaacaccagcagccgttgcaagaccggatgttcaaatttgaactcacccgccgtctggatcatgactttgggaaggtcaccaagcaggaagtcaaagactttttccggtgggcaaaggatcacgtggttgaggtggagcatgaattctacgtcaaaaagggtggagccaagaaaagacccgcccccagtgacgcagatataagtgagcccaaacgggtgcgcgagtcagttgcgcagccatcgacgtcagacgcggaagcttcgatcaactacgcagacaggtaccaaaacaaatgttctcgtcacgtgggcatgaatctgatgctgtttccctgcagacaatgcgagagaatgaatcagaattcaaatatctgcttcactcacggacagaaagactgtttagagtgctttcccgtgtcagaatctcaacccgtttctgtcgtcaaaaaggcgtatcagaaactgtgctacattcatcatatcatgggaaaggtgccagacgcttgcactgcctgcgatctggtcaatgtggatttggatgactgcatctttgaacaataaatgatttaaatcaggtatggctgccgatggttatcttccagattggctcgaggacaaccttagtgaaggaattcgcgagtggtgggctttgaaacctggagcccctcaacccaaggcaaatcaacaacatcaagacaacgctcgaggtcttgtgcttccgggttacaaataccttggacccggcaacggactcgacaagggggagccggtcaacgcagcagacgcggcggccctcgagcacgacaaggcctacgaccagcagctcaaggccggagacaacccgtacctcaagtacaaccacgccgacgccgagttccaggagcggctcaaagaagatacgtcttttgggggcaacctcgggcgagcagtcttccaggccaaaaagaggcttcttgaacctcttggtctggttgaggaagcggctaagacggctcctggaaagaagaggcctgtagagcagtctcctcaggaaccggactcctccgcgggtattggcaaatcgggtgcacagcccgctaaaaagagactcaatttcggtcagactggcgacacagagtcagtcccagaccctcaaccaatcggagaacctcccgcagccccctcaggtgtgggatctcttacaatggcttcaggtggtggcgcaccagtggcagacaataacgaaggtgccgatggagtgggtagttcctcgggaaattggcattgcgattcccaatggctgggggacagagtcatcaccaccagcacccgaacctgggccctgcccacctacaacaatcacctctacaagcaaatctccaacagcacatctggaggatcttcaaatgacaacgcctacttcggctacagcaccccctgggggtattttgacttcaacagattccactgccacttctcaccacgtgactggcagcgactcatcaacaacaactggggattccggcctaagcgactcaacttcaagctcttcaacattcaggtcaaagaggttacggacaacaatggagtcaagaccatcgccaataaccttaccagcacggtccaggtcttcacggactcagactatcagctcccgtacgtgctcgggtcggctcacgagggctgcctcccgccgttcccagcggacgttttcatgattcctcagtacgggtatctgacgcttaatgatggaagccaggccgtgggtcgttcgtccttttactgcctggaatatttcccgtcgcaaatgctaagaacgggtaacaacttccagttcagctacgagtttgagaacgtacctttccatagcagctacgctcacagccaaagcctggaccgactaatgaatccactcatcgaccaatacttgtactatctctcaaagactattaacggttctggacagaatcaacaaacgctaaaattcagtgtggccggacccagcaacatggctgtccagggaagaaactacatacctggacccagctaccgacaacaacgtgtctcaaccactgtgactcaaaacaacaacagcgaatttgcttggcctggagcttcttcttgggctctcaatggacgtaatagcttgatgaatcctggacctgctatggccagccacaaagaaggagaggaccgtttctttcctttgtctggatctttaatttttggcaaacaaggaactggaagagacaacgtggatgcggacaaagtcatgataaccaacgaagaagaaattaaaactactaacccggtagcaacggagtcctatggacaagtggccacaaaccaccagagtgcccaagcacaggcgcagaccggctgggttcaaaaccaaggaatacttccgggtatggtttggcaggacagagatgtgtacctgcaaggacccatttgggccaaaattcctcacacggacggcaactttcacccttctccgctgatgggagggtttggaatgaagcacccgcctcctcagatcctcatcaaaaacacacctgtacctgcggatcctccaacggccttcaacaaggacaagctgaactctttcatcacccagtattctactggccaagtcagcgtggagatcgagtgggagctgcagaaggaaaacagcaagcgctggaacccggagatccagtacacttccaactattacaagtctaataatgttgaatttgctgttaatactgaaggtgtatatagtgaaccccgccccattggcaccagatacctgactcgtaatctgtaattgcctgttaatcaataaaccggttgattcgtttcagttgaactttggtctctgcgaagggcgaattcgtttaaacctgcaggactagagccgaattctgcatcgcgatagggataacagggtaataaataatgtactagagacactttcaataaaggcaaatgcttttatttgtacactctcgggtgattatttacccccacccttgccgtctgcgccgttcagaagtcgaaggggttctgtctggcatcggaatgggccacgggcagagacacgttccggtactggtgcttggtggaccacttgaactcaggcacgaccattctaggcagctctgtgaagttctcgctccacaggctccgcaccatcaccagggcgttcagcaggtcaggggcgctgattttgaagtcgcagttaggtccgccgccctgggctctgctgtttctgtacacagggttgcagcactggaacacaataagagcagggtggtgcacgctggccagcacagacttgtcgctgatcaggtcggcgtcgagatcctcggcgttagacaaggcaaaaggggtcagcttgggcagctggcggcccaggaaaggggcgtggccgggcttgctattgcactcgcatctcagaggcatcagcaggtggccgtggccggtctgggcgttggggtacagggcctgcataaaggccttgatctgtttgaaggccacttgggccttggcgccttcggagaagaacatgccgcagcttttgccgctgaactggttggcggggcaggcggcgtcgtgcacacaacaccgggcgtcggtattgctgatctgcaccacgtttctgccccatctgttcttcacgatcttggccttgctgctctgctctttcagggccctctggccgttctcagaggtgacgtccatctcgatcacatgttccttgttgatcatgatgctgccgtgcagacacttcagctcgccctcgatttccgcgcatctgtgcagccacagggcacaaccggtaggctcgtggtgcttgtatgtcacctcagcaaaagattgcaggtaggcttgcaggaatctgcccatcatggtcacgaaggtcttgttggaggtaaaagtcagctgcagtcctctgtgttcctcgttcagccatgtcttgcacacggcggccagagcctcgacctgatctggcagcagcttgaaattagccttcaggtcgttgtccacgtgatacttatccatcagtgctctggcggcttccatgcccttctcccaggcggaaacgatgggcacgctcagggggttcatcacggtgatctcgctttcagcttctgaaggttcctcctcttcctcctgtgttctcatgccccgagccacggggtcgtcctcattcagtctccgcacggttctttttcctccctttccgtgcttaatcagtacaggaggattagagaagcccaccatctggagggcgacgtcctccctttcttcttcgctatccacgatcacttctgggctggggggccgttcaggctttgggctaggccgtttttttttcttcttaggggcgatagccagatcagcggcgcttgtagagggccgaggactaggggttctaggcacgagggcgtcctggctgctgtcctcctcatcctcgctctcgatccgtctccgcattctcttcttagggggggcccgcggagggggagggctagggctaggggacgacacatcttccatggttggaggtctgcgagcagcgcctctgcctctctctggtgttgtctcgcgctgttcttcctctctagaggccatttccttctcctataggcagaaaaagatcgttgaaactcactccggggctgtggacgtcggcttaccttcgcaaatttgtacctgaggactaccacgcccacgagattaggttctacgaagaccaatcccgcccgcctaatgcggagcttaccgcctgcgtcattacccagggccacattcttggccaattgcaagccatcaacaaagcccgccaagagtttctgctacgaaagggacggggggtttacttggacccccagtccggcgaggagctcaacccaatccccccgccgccgcagccctatcagcagcagccgcgggcccttgcttcccaggatggcacccaaaaagaagctgcagctgccgccgccacccacggacgaggaggaatactgggacagtcaggcagaggaggttttggacgaggaggaggaggacatgatggaagactgggagagcctagacgaggaagcttccgaggtcgaagaggtgtcagacgaaacaccgtcaccctcggtcgcattcccctcgccggcgccccagaaatcggcaaccggttccagcatggctacaacctccgctcctcaggcgccgccggcactgcccgttcgccgacccaaccgtagatgggacaccactggaaccagggccggtaagtccaagcagccgccgccgttagcccaagagcaacaacagcgccaaggctaccgctcatggcgcgggcacaagaacgccatagttgcttgcttgcaagactgtgggggcaacatctccttcgcccgccgctttcttctctaccatcacggcgtggccttcccccgtaacatcctgcattactaccgtcatctctacagcccatactgcaccggcggcagcggcagcaacagcagcggccacacagaagcaaaggcgaccggatagcaagactctgacaaagcccaagaaatccacagcggcggcagcagcaggaggaggagcgctgcgtctggcgcccaacgaacccgtatcgacccgcgagcttagaaacaggatttttcccactctgtatgctatatttcaacagagcaggggccaagaacaagagctgaaaataaaaaacaggtctctgcgatccctcacccgcagctgcctgtatcacaaaagcgaagatcagcttcggcgcacgctggaagacgcggaggctctcttcagtaaatactgcgcgctgactcttaaggactagtttcgcgccctttctcaaatttaagcgcgaaaactacgtcatctccagcggccacacccggcgccagcacctgttgtcagcgccattttttagggcggagtaacttgtatgtgttgggaattgtagttttcttaaaatgggaagtgacgtaacgtgggaaaacggaagtgacgatttgaggaagttgtgggttttttggctttcgtttctgggcgtaggttcgcgtgcggttttctgggtgttttttgtggactttaaccgttacgtcattttttagtcctatatatactcgctctgcacttggcccttttttacactgtgactgattgagctggtgccgtgtcgagtggtgtttttttaataggttttcttttttactggtaaggctgactgttatgactacgtccggcgttccatttggcatgacactacgaccaacacgatctcggttgtctcggcgcactccgtacagtagggatcgtctacctccttttgagacagaaacccgcgctaccatactggaggatcatccgctgctgcccgaatgtaacactttgacaatgcacaacgtgagttacgtgcgaggtcttccctgcagtgtgggatttacgctgattcaggaatgggttgttccctgggatatggttctaacgcgggaggagcttgtaatcctgaggaagtgtatgcacgtgtgcctgtgttgtgccaacattgatatcatgacgagcatgatgatccatggttacgagtcctgggctctccactgtcattgttccagtcccggttccctgcagtgtatagccggcgggcaggttttggccagctggtttaggatggtggtggatggcgccatgtttaatcagaggtttatatggtaccgggaggtggtgaattacaacatgccaaaagaggtaatgtttatgtccagcgtgtttatgaggggtcgccacttaatctacctgcgcttgtggtatgatggccacgtgggttctgtggtccccgccatgagctttggatacagcgccttgcactgtgggattttgaacaatattgtggtgctgtgctgcagttactgtgctgatttaagtgagatcagggtgcgctgctgtgcccggaggacaaggcgccttatgctgcgggcggtgcgaatcatcgctgaggagaccactgccatgttgtattcctgcaggacggagcggcggcggcagcagtttattcgcgcgctgctgcagcaccaccgccctatcctgatgcacgattatgactctacccccatgtaggcgtggacttctccttcgccgcccgttaagcaaccgcaagttggacagcagcctgtggctcagcagctggacagcgacatgaacttaagtgagctgcccggggagtttattaatatcactgatgagcgtttggctcgacaggaaaccgtgtggaatataacacctaagaatatgtctgttacccatgatatgatgctttttaaggccagccggggagaaaggactgtgtactctgtgtgttgggagggaggtggcaggttgaatactagggttctgtgagtttgattaaggtacggtgatctgtataagctatgtggtggtggggctatactactgaatgaaaaatgacttgaaattttctgcaattgaaaaataaacacgttgaaacataacacaaacgattctttattcttgggcaatgtatgaaaaagtgtaagaggatgtggcaaatatttcattaatgtagttgtggccagaccagtcccatgaaaatgacatagagtatgcacttggagttgtgtctcctgtttcctgtgtaccgtttagtgtaatggttagtgttacaggtttagttttgtctccgtttaagtaaacttgactgacaatgttacttttggcagttttaccgtgagattttggataagctgataggttaggcataaatccaacagcgtttgtataggctgtcgcccctcctgacgcggtaggaggaggggagggtgccctgcatgtctgccgctgctcttgctcttgccgctgctgaggaggggggcgcatctgccgcagcaccggatgcatctgggaaaagcaaaaaaggggctcgtccctgtttccggaggaatttgcaagcggggtcttgcatgacggggaggcaaacccccgttcgccgcagtccggccggtccgagactcgaaccgggggtcccgcgactcaacccttggaaaataaccctccggctacagggagcgagccacttaatgctttcgctttccagcctaaccgcttacgctgcgcgcggccagtggccaaaaaagctagcgcagcagccgccgcgcctggaaggaagccaaaaggagcactcccccgttgtctgacgtcgcacacctgggttcgacacgcgggcggtaaccgcatggatcacggcggacggccggatacggggctcgaaccccggtcgtccgccatgatacccttgcgaatttatccaccagaccacggaagagtgcccgcttacaggctctccttttgcacggtctagagcgtcaacgattgcgcgcgcctgaccggccagagcgtcccgaccatggagcactttttgccgctgcgcaacatctggaaccgcgtccgcgactttccgcgcgcctccaccaccgccgccggcatcacctggatgtccaggtacatctacggata

SEQ ID NO: 79 - DNA, 9816 bp, synthetic construct
  source 1..9816: mol_type = other DNA
atgccggggttttacgagattgtgattaaggtccccagcgaccttgacgagcatctgcccggcatttctgacagctttgtgaactgggtggccgagaaggaatgggagttgccgccagattctgacatggatctgaatctgattgagcaggcacccctgaccgtggccgagaagctgcagcgcgactttctgacggaatggcgccgtgtgagtaaggccccggaggctcttttctttgtgcaatttgagaagggagagagctacttccacatgcacgtgctcgtggaaaccaccggggtgaaatccatggttttgggacgtttcctgagtcagattcgcgaaaaactgattcagagaatttaccgcgggatcgagccgactttgccaaactggttcgcggtcacaaagaccagaaatggcgccggaggcgggaacaaggtggtggatgagtgctacatccccaattacttgctccccaaaacccagcctgagctccagtgggcgtggactaatatggaacagtatttaagcgcctgtttgaatctcacggagcgtaaacggttggtggcgcagcatctgacgcacgtgtcgcagacgcaggagcagaacaaagagaatcagaatcccaattctgatgcgccggtgatcagatcaaaaacttcagccaggtacatggagctggtcgggtggctcgtggacaaggggattacctcggagaagcagtggatccaggaggaccaggcctcatacatctccttcaatgcggcctccaactcgcggtcccaaatcaaggctgccttggacaatgcgggaaagattatgagcctgactaaaaccgcccccgactacctggtgggccagcagcccgtggaggacatttccagcaatcggatttataaaattttggaactaaacgggtacgatccccaatatgcggcttccgtctttctgggatgggccacgaaaaagttcggcaagaggaacaccatctggctgtttgggcctgcaactaccgggaagaccaacatcgcggaggccatagcccacactgtgcccttctacgggtgcgtaaactggaccaatgagaactttcccttcaacgactgtgtcgacaagatggtgatctggtgggaggaggggaagatgaccgccaaggtcgtggagtcggccaaagccattctcggaggaagcaaggtgcgcgtggaccagaaatgcaagtcctcggcccagatagacccgactcccgtgatcgtcacctccaacaccaacatgtgcgccgtgattgacgggaactcaacgaccttcgaacaccagcagccgttgcaagaccggatgttcaaatttgaactcacccgccgtctggatcatgactttgggaaggtcaccaagcaggaagtcaaagactttttccggtgggcaaaggatcacgtggttgaggtggagcatgaattctacgtcaaaaagggtggagccaagaaaagacccgcccccagtgacgcagatataagtgagcccaaacgggtgcgcgagtcagttgcgcagccatcgacgtcagacgcggaagcttcgatcaactacgcagacaggtaccaaaacaaatgttctcgtcacgtgggcatgaatctgatgctgtttccctgcagacaatgcgagagaatgaatcagaattcaaatatctgcttcactcacggacagaaagactgtttagagtgctttcccgtgtcagaatctcaacccgtttctgtcgtcaaaaaggcgtatcagaaactgtgctacattcatcatatcatgggaaaggtgccagacgcttgcactgcctgcgatctggtcaatgtggatttggatgactgcatctttgaacaataaatgatttaaatcaggtatggctgccgatggttatcttccagattggctcgaggacactctctctgaaggaataagacagtggtggaagctcaaacctggcccaccaccaccaaagcccgcagagcggcataaggacgacagcaggggtcttgtgcttcctgggtacaagtacctcggacccttcaacggactcgacaagggagagccggtcaacgaggcagacgccgcggccctcgagcacgacaaagcctacgaccggcagctcgacagcggagacaacccgtacctcaagtacaaccacgccgacgcggagtttcaggagcgccttaaagaagatacgtcttttgggggcaacctcggacgagcagtcttccaggcgaaaaagagggttcttgaacctctgggcctggttgaggaacctgttaagacggctccgggaaaaaagaggccggtagagcactctcctgtggagccagactcctcctcgggaaccggaaaggcgggccagcagcctgcaagaaaaagattgaattttggtcagactggagacgcagactcagtacctgacccccagcctctcggacagccaccagcagccccctctggtctgggaactaatacgatggctacaggcagtggcgcaccaatggcagacaataacgagggcgccgacggagtgggtaattcctcgggaaattggcattgcgattccacatggatgggcgacagagtcatcaccaccagcacccgaacctgggccctgcccacctacaacaaccacctctacaaacaaatttccagccaatcaggagcctcgaacgacaatcactactttggctacagcaccccttgggggtattttgacttcaacagattccactgccacttttcaccacgtgactggcaaagactcatcaacaacaactggggattccgacccaagagactcaacttcaagctctttaacattcaagtcaaagaggtcacgcagaatgacggtacgacgacgattgccaataaccttaccagcacggttcaggtgtttactgactcggagtaccagctcccgtacgtcctcggctcggcgcatcaaggatgcctcccgccgttcccagcagacgtcttcatggtgccacagtatggatacctcaccctgaacaacgggagtcaggcagtaggacgctcttcattttactgcctggagtactttccttctcagatgctgcgtaccggaaacaactttaccttcagctacacttttgaggacgttcctttccacagcagctacgctcacagccagagtctggaccgtctcatgaatcctctcatcgaccagtacctgtattacttgagcagaacaaacactccaagtggaaccaccacgcagtcaaggcttcagttttctcaggccggagcgagtgacattcgggaccagtctaggaactggcttcctggaccctgttaccgccagcagcgagtatcaaagacatctgcggataacaacaacagtgaatactcgtggactggagctaccaagtaccacctcaatggcagagactctctggtgaatccgggcccggccatggcaagccacaaggacgatgaagaaaagttttttcctcagagcggggttctcatctttgggaagcaaggctcagagaaaacaaatgtggacattgaaaaggtcatgattacagacgaagaggaaatcaggacaaccaatcccgtggctacggagcagtatggttctgtatctaccaacctccagagaggcaacagacaagcagctaccgcagatgtcaacacacaaggcgttcttccaggcatggtctggcaggacagagatgtgtaccttcaggggcccatctgggcaaagattccacacacggacggacattttcacccctctcccctcatgggtggattcggacttaaacaccctcctccacagattctcatcaagaacaccccggtacctgcgaatccttcgaccaccttcagtgcggcaaagtttgcttccttcatcacacagtactccacgggacaggtcagcgtggagatcgagtgggagctgcagaaggaaaacagcaaacgctggaatcccgaaattcagtacacttccaactacaacaagtctgttaatgtggactttactgtggacactaatggcgtgtattcagagcctcgccccattggcaccagatacctgactcgtaatctgtaattgcctgttaatcaataaaccggttgattcgtttcagttgaactttggtctctgcgaagggcgaattcgtttaaacctgcaggactagagccgaattctgcatcgcgatagggataacagggtaataaataatgtactagagacactttcaataaaggcaaatgcttttatttgtacactctcgggtgattatttacccccacccttgccgtctgcgccgttcagaagtcgaaggggttctgtctggcatcggaatgggccacgggcagagacacgttccggtactggtgcttggtggaccacttgaactcaggcacgaccattctaggcagctctgtgaagttctcgctccacaggctccgcaccatcaccagggcgttcagcaggtcaggggcgctgattttgaagtcgcagttaggtccgccgccctgggctctgctgtttctgtacacagggttgcagcactggaacacaataagagcagggtggtgcacgctggccagcacagacttgtcgctgatcaggtcggcgtcgagatcctcggcgttagacaaggcaaaaggggtcagcttgggcagctggcggcccaggaaaggggcgtggccgggcttgctattgcactcgcatctcagaggcatcagcaggtggccgtggccggtctgggcgttggggtacagggcctgcataaaggccttgatctgtttgaaggccacttgggccttggcgccttcggagaagaacatgccgcagcttttgccgctgaactggttggcggggcaggcggcgtcgtgcacacaacaccgggcgtcggtattgctgatctgcaccacgtttctgccccatctgttcttcacgatcttggccttgctgctctgctctttcagggccctctggccgttctcagaggtgacgtccatctcgatcacatgttccttgttgatcatgatgctgccgtgcagacacttcagctcgccctcgatttccgcgcatctgtgcagccacagggcacaaccggtaggctcgtggtgcttgtatgtcacctcagcaaaagattgcaggtaggcttgcaggaatctgcccatcatggtcacgaaggtcttgttggaggtaaaagtcagctgcagtcctctgtgttcctcgttcagccatgtcttgcacacggcggccagagcctcgacctgatctggcagcagcttgaaattagccttcaggtcgttgtccacgtgatacttatccatcagtgctctggcggcttccatgcccttctcccaggcggaaacgatgggcacgctcagggggttcatcacggtgatctcgctttcagcttctgaaggttcctcctcttcctcctgtgttctcatgccccgagccacggggtcgtcctcattcagtctccgcacggttctttttcctccctttccgtgcttaatcagtacaggaggattagagaagcccaccatctggagggcgacgtcctccctttcttcttcgctatccacgatcacttctgggctggggggccgttcaggctttgggctaggccgtttttttttcttcttaggggcgatagccagatcagcggcgcttgtagagggccgaggactaggggttctaggcacgagggcgtcctggctgctgtcctcctcatcctcgctctcgatccgtctccgcattctcttcttagggggggcccgcggagggggagggctagggctaggggacgacacatcttccatggttggaggtctgcgagcagcgcctctgcctctctctggtgttgtctcgcgctgttcttcctctctagaggccatttccttctcctataggcagaaaaagatcgttgaaactcactccggggctgtggacgtcggcttaccttcgcaaatttgtacctgaggactaccacgcccacgagattaggttctacgaagaccaatcccgcccgcctaatgcggagcttaccgcctgcgtcattacccagggccacattcttggccaattgcaagccatcaacaaagcccgccaagagtttctgctacgaaagggacggggggtttacttggacccccagtccggcgaggagctcaacccaatccccccgccgccgcagccctatcagcagcagccgcgggcccttgcttcccaggatggcacccaaaaagaagctgcagctgccgccgccacccacggacgaggaggaatactgggacagtcaggcagaggaggttttggacgaggaggaggaggacatgatggaagactgggagagcctagacgaggaagcttccgaggtcgaagaggtgtcagacgaaacaccgtcaccctcggtcgcattcccctcgccggcgccccagaaatcggcaaccggttccagcatggctacaacctccgctcctcaggcgccgccggcactgcccgttcgccgacccaaccgtagatgggacaccactggaaccagggccggtaagtccaagcagccgccgccgttagcccaagagcaacaacagcgccaaggctaccgctcatggcgcgggcacaagaacgccatagttgcttgcttgcaagactgtgggggcaacatctccttcgcccgccgctttcttctctaccatcacggcgtggccttcccccgtaacatcctgcattactaccgtcatctctacagcccatactgcaccggcggcagcggcagcaacagcagcggccacacagaagcaaaggcgaccggatagcaagactctgacaaagcccaagaaatccacagcggcggcagcagcaggaggaggagcgctgcgtctggcgcccaacgaacccgtatcgacccgcgagcttagaaacaggatttttcccactctgtatgctatatttcaacagagcaggggccaagaacaagagctgaaaataaaaaacaggtctctgcgatccctcacccgcagctgcctgtatcacaaaagcgaagatcagcttcggcgcacgctggaagacgcggaggctctcttcagtaaatactgcgcgctgactcttaaggactagtttcgcgccctttctcaaatttaagcgcgaaaactacgtcatctccagcggccacacccggcgccagcacctgttgtcagcgccattttttagggcggagtaacttgtatgtgttgggaattgtagttttcttaaaatgggaagtgacgtaacgtgggaaaacggaagtgacgatttgaggaagttgtgggttttttggctttcgtttctgggcgtaggttcgcgtgcggttttctgggtgttttttgtggactttaaccgttacgtcattttttagtcctatatatactcgctctgcacttggcccttttttacactgtgactgattgagctggtgccgtgtcgagtggtgtttttttaataggttttcttttttactggtaaggctgactgttatgactacgtccggcgttccatttggcatgacactacgaccaacacgatctcggttgtctcggcgcactccgtacagtagggatcgtctacctccttttgagacagaaacccgcgctaccatactggaggatcatccgctgctgcccgaatgtaacactttgacaatgcacaacgtgagttacgtgcgaggtcttccctgcagtgtgggatttacgctgattcaggaatgggttgttccctgggatatggttctaacgcgggaggagcttgtaatcctgaggaagtgtatgcacgtgtgcctgtgttgtgccaacattgatatcatgacgagcatgatgatccatggttacgagtcctgggctctccactgtcattgttccagtcccggttccctgcagtgtatagccggcgggcaggttttggccagctggtttaggatggtggtggatggcgccatgtttaatcagaggtttatatggtaccgggaggtggtgaattacaacatgccaaaagaggtaatgtttatgtccagcgtgtttatgaggggtcgccacttaatctacctgcgcttgtggtatgatggccacgtgggttctgtggtccccgccatgagctttggatacagcgccttgcactgtgggattttgaacaatattgtggtgctgtgctgcagttactgtgctgatttaagtgagatcagggtgcgctgctgtgcccggaggacaaggcgccttatgctgcgggcggtgcgaatcatcgctgaggagaccactgccatgttgtattcctgcaggacggagcggcggcggcagcagtttattcgcgcgctgctgcagcaccaccgccctatcctgatgcacgattatgactctacccccatgtaggcgtggacttctccttcgccgcccgttaagcaaccgcaagttggacagcagcctgtggctcagcagctggacagcgacatgaacttaagtgagctgcccggggagtttattaatatcactgatgagcgtttggctcgacaggaaaccgtgtggaatataacacctaagaatatgtctgttacccatgatatgatgctttttaaggccagccggggagaaaggactgtgtactctgtgtgttgggagggaggtggcaggttgaatactagggttctgtgagtttgattaaggtacggtgatctgtataagctatgtggtggtggggctatactactgaatgaaaaatgacttgaaattttctgcaattgaaaaataaacacgttgaaacataacacaaacgattctttattcttgggcaatgtatgaaaaagtgtaagaggatgtggcaaatatttcattaatgtagttgtggccagaccagtcccatgaaaatgacatagagtatgcacttggagttgtgtctcctgtttcctgtgtaccgtttagtgtaatggttagtgttacaggtttagttttgtctccgtttaagtaaacttgactgacaatgttacttttggcagttttaccgtgagattttggataagctgataggttaggcataaatccaacagcgtttgtataggctgtcgcccctcctgacgcggtaggaggaggggagggtgccctgcatgtctgccgctgctcttgctcttgccgctgctgaggaggggggcgcatctgccgcagcaccggatgcatctgggaaaagcaaaaaaggggctcgtccctgtttccggaggaatttgcaagcggggtcttgcatgacggggaggcaaacccccgttcgccgcagtccggccggtccgagactcgaaccgggggtcccgcgactcaacccttggaaaataaccctccggctacagggagcgagccacttaatgctttcgctttccagcctaaccgcttacgctgcgcgcggccagtggccaaaaaagctagcgcagcagccgccgcgcctggaaggaagccaaaaggagcactcccccgttgtctgacgtcgcacacctgggttcgacacgcgggcggtaaccgcatggatcacggcggacggccggatacggggctcgaaccccggtcgtccgccatgatacccttgcgaatttatccaccagaccacggaagagtgcccgcttacaggctctccttttgcacggtctagagcgtcaacgattgcgcgcgcctgaccggccagagcgtcccgaccatggagcactttttgccgctgcgcaacatctggaaccgcgtccgcgactttccgcgcgcctccaccaccgccgccggcatcacctggatgtccaggtacatctacggata

SEQ ID NO: 80 - DNA, 9819 bp, synthetic construct
  source 1..9819: mol_type = other DNA
atgccggggttttacgagattgtgattaaggtccccagcgaccttgacgagcatctgcccggcatttctgacagctttgtgaactgggtggccgagaaggaatgggagttgccgccagattctgacatggatctgaatctgattgagcaggcacccctgaccgtggccgagaagctgcagcgcgactttctgacggaatggcgccgtgtgagtaaggccccggaggctcttttctttgtgcaatttgagaagggagagagctacttccacatgcacgtgctcgtggaaaccaccggggtgaaatccatggttttgggacgtttcctgagtcagattcgcgaaaaactgattcagagaatttaccgcgggatcgagccgactttgccaaactggttcgcggtcacaaagaccagaaatggcgccggaggcgggaacaaggtggtggatgagtgctacatccccaattacttgctccccaaaacccagcctgagctccagtgggcgtggactaatatggaacagtatttaagcgcctgtttgaatctcacggagcgtaaacggttggtggcgcagcatctgacgcacgtgtcgcagacgcaggagcagaacaaagagaatcagaatcccaattctgatgcgccggtgatcagatcaaaaacttcagccaggtacatggagctggtcgggtggctcgtggacaaggggattacctcggagaagcagtggatccaggaggaccaggcctcatacatctccttcaatgcggcctccaactcgcggtcccaaatcaaggctgccttggacaatgcgggaaagattatgagcctgactaaaaccgcccccgactacctggtgggccagcagcccgtggaggacatttccagcaatcggatttataaaattttggaactaaacgggtacgatccccaatatgcggcttccgtctttctgggatgggccacgaaaaagttcggcaagaggaacaccatctggctgtttgggcctgcaactaccgggaagaccaacatcgcggaggccatagcccacactgtgcccttctacgggtgcgtaaactggaccaatgagaactttcccttcaacgactgtgtcgacaagatggtgatctggtgggaggaggggaagatgaccgccaaggtcgtggagtcggccaaagccattctcggaggaagcaaggtgcgcgtggaccagaaatgcaagtcctcggcccagatagacccgactcccgtgatcgtcacctccaacaccaacatgtgcgccgtgattgacgggaactcaacgaccttcgaacaccagcagccgttgcaagaccggatgttcaaatttgaactcacccgccgtctggatcatgactttgggaaggtcaccaagcaggaagtcaaagactttttccggtgggcaaaggatcacgtggttgaggtggagcatgaattctacgtcaaaaagggtggagccaagaaaagacccgcccccagtgacgcagatataagtgagcccaaacgggtgcgcgagtcagttgcgcagccatcgacgtcagacgcggaagcttcgatcaactacgcagacaggtaccaaaacaaatgttctcgtcacgtgggcatgaatctgatgctgtttccctgcagacaatgcgagagaatgaatcagaattcaaatatctgcttcactcacggacagaaagactgtttagagtgctttcccgtgtcagaatctcaacccgtttctgtcgtcaaaaaggcgtatcagaaactgtgctacattcatcatatcatgggaaaggtgccagacgcttgcactgcctgcgatctggtcaatgtggatttggatgactgcatctttgaacaataaatgatttaaatcaggtatggctgccgatggttatcttccagattggctcgaggacaacctctctgagggcattcgcgagtggtgggacttgaaacctggagccccgaaacccaaagccaaccagcaaaagcaggacgacggccggggtctggtgcttcctggctacaagtacctcggacccttcaacggactcgacaagggggagcccgtcaacgcggcggatgcagcggccctcgagcacgacaaggcctacgaccagcagctcaaagcgggtgacaatccgtacctgcggtataaccacgccgacgccgagtttcaggagcgtctgcaagaagatacgtcttttgggggcaacctcgggcgagcagtcttccaggccaagaagagggttctcgaaccttttggtctggttgaggaaggtgctaagacggctcctggaaagaaacgtccggtagagcagtcgccacaagagccagactcctcctcgggcattggcaagacaggccagcagcccgctaaaaagagactcaattttggtcagactggcgactcagagtcagtccccgacccacaacctctcggagaacctccagcaacccccgctgctgtgggacctactacaatggcttcaggcggtggcgcaccaatggcagacaataacgaaggcgccgacggagtgggtaatgcctcaggaaattggcattgcgattccacatggctgggcgacagagtcatcaccaccagcacccgaacatgggccttgcccacctataacaaccacctctacaagcaaatctccagtgcttcaacgggggccagcaacgacaaccactacttcggctacagcaccccctgggggtattttgatttcaacagattccactgccatttctcaccacgtgactggcagcgactcatcaacaacaattggggattccggcccaagagactcaacttcaagctcttcaacatccaagtcaaggaggtcacgacgaatgatggcgtcacgaccatcgctaataaccttaccagcacggttcaagtcttctcggactcggagtaccagttgccgtacgtcctcggctctgcgcaccagggctgcctccctccgttcccggcggacgtgttcatgattccgcagtacggctacctaacgctcaacaatggcagccaggcagtgggacggtcatccttttactgcctggaatatttcccatcgcagatgctgagaacgggcaataactttaccttcagctacaccttcgaggacgtgcctttccacagcagctacgcgcacagccagagcctggaccggctgatgaatcctctcatcgaccagtacctgtattacctgaacagaactcagaatcagtccggaagtgcccaaaacaaggacttgctgtttagccgggggtctccagctggcatgtctgttcagcccaaaaactggctacctggaccctgttaccggcagcagcgcgtttctaaaacaaaaacagacaacaacaacagcaactttacctggactggtgcttcaaaatataaccttaatgggcgtgaatctataatcaaccctggcactgctatggcctcacacaaagacgacaaagacaagttctttcccatgagcggtgtcatgatttttggaaaggagagcgccggagcttcaaacactgcattggacaatgtcatgatcacagacgaagaggaaatcaaagccactaaccccgtggccaccgaaagatttgggactgtggcagtcaatctccagagcagcagcacagaccctgcgaccggagatgtgcatgttatgggagccttacctggaatggtgtggcaagacagagacgtatacctgcagggtcctatttgggccaaaattcctcacacggatggacactttcacccgtctcctctcatgggcggctttggacttaagcacccgcctcctcagatcctcatcaaaaacacgcctgttcctgcgaatcctccggcagagttttcggctacaaagtttgcttcattcatcacccagtattccacaggacaagtgagcgtggagattgaatgggagctgcagaaagaaaacagcaaacgctggaatcccgaagtgcagtatacatctaactatgcaaaatctgccaacgttgatttcactgtggacaacaatggactttatactgagcctcgccccattggcacccgttacctcacccgtcccctgtaattgcctgttaatcaataaaccggttgattcgtttcagttgaactttggtctctgcgaagggcgaattcgtttaaacctgcaggactagagccgaattctgcatcgcgatagggataacagggtaataaataatgtactagagacactttcaataaaggcaaatgcttttatttgtacactctcgggtgattatttacccccacccttgccgtctgcgccgttcagaagtcgaaggggttctgtctggcatcggaatgggccacgggcagagacacgttccggtactggtgcttggtggaccacttgaactcaggcacgaccattctaggcagctctgtgaagttctcgctccacaggctccgcaccatcaccagggcgttcagcaggtcaggggcgctgattttgaagtcgcagttaggtccgccgccctgggctctgctgtttctgtacacagggttgcagcactggaacacaataagagcagggtggtgcacgctggccagcacagacttgtcgctgatcaggtcggcgtcgagatcctcggcgttagacaaggcaaaaggggtcagcttgggcagctggcggcccaggaaaggggcgtggccgggcttgctattgcactcgcatctcagaggcatcagcaggtggccgtggccggtctgggcgttggggtacagggcctgcataaaggccttgatctgtttgaaggccacttgggccttggcgccttcggagaagaacatgccgcagcttttgccgctgaactggttggcggggcaggcggcgtcgtgcacacaacaccgggcgtcggtattgctgatctgcaccacgtttctgccccatctgttcttcacgatcttggccttgctgctctgctctttcagggccctctggccgttctcagaggtgacgtccatctcgatcacatgttccttgttgatcatgatgctgccgtgcagacacttcagctcgccctcgatttccgcgcatctgtgcagccacagggcacaaccggtaggctcgtggtgcttgtatgtcacctcagcaaaagattgcaggtaggcttgcaggaatctgcccatcatggtcacgaaggtcttgttggaggtaaaagtcagctgcagtcctctgtgttcctcgttcagccatgtcttgcacacggcggccagagcctcgacctgatctggcagcagcttgaaattagccttcaggtcgttgtccacgtgatacttatccatcagtgctctggcggcttccatgcccttctcccaggcggaaacgatgggcacgctcagggggttcatcacggtgatctcgctttcagcttctgaaggttcctcctcttcctcctgtgttctcatgccccgagccacggggtcgtcctcattcagtctccgcacggttctttttcctccctttccgtgcttaatcagtacaggaggattagagaagcccaccatctggagggcgacgtcctccctttcttcttcgctatccacgatcacttctgggctggggggccgttcaggctttgggctaggccgtttttttttcttcttaggggcgatagccagatcagcggcgcttgtagagggccgaggactaggggttctaggcacgagggcgtcctggctgctgtcctcctcatcctcgctctcgatccgtctccgcattctcttcttagggggggcccgcggagggggagggctagggctaggggacgacacatcttccatggttggaggtctgcgagcagcgcctctgcctctctctggtgttgtctcgcgctgttcttcctctctagaggccatttccttctcctataggcagaaaaagatcgttgaaactcactccggggctgtggacgtcggcttaccttcgcaaatttgtacctgaggactaccacgcccacgagattaggttctacgaagaccaatcccgcccgcctaatgcggagcttaccgcctgcgtcattacccagggccacattcttggccaattgcaagccatcaacaaagcccgccaagagtttctgctacgaaagggacggggggtttacttggacccccagtccggcgaggagctcaacccaatccccccgccgccgcagccctatcagcagcagccgcgggcccttgcttcccaggatggcacccaaaaagaagctgcagctgccgccgccacccacggacgaggaggaatactgggacagtcaggcagaggaggttttggacgaggaggaggaggacatgatggaagactgggagagcctagacgaggaagcttccgaggtcgaagaggtgtcagacgaaacaccgtcaccctcggtcgcattcccctcgccggcgccccagaaatcggcaaccggttccagcatggctacaacctccgctcctcaggcgccgccggcactgcccgttcgccgacccaaccgtagatgggacaccactggaaccagggccggtaagtccaagcagccgccgccgttagcccaagagcaacaacagcgccaaggctaccgctcatggcgcgggcacaagaacgccatagttgcttgcttgcaagactgtgggggcaacatctccttcgcccgccgctttcttctctaccatcacggcgtggccttcccccgtaacatcctgcattactaccgtcatctctacagcccatactgcaccggcggcagcggcagcaacagcagcggccacacagaagcaaaggcgaccggatagcaagactctgacaaagcccaagaaatccacagcggcggcagcagcaggaggaggagcgctgcgtctggcgcccaacgaacccgtatcgacccgcgagcttagaaacaggatttttcccactctgtatgctatatttcaacagagcaggggccaagaacaagagctgaaaataaaaaacaggtctctgcgatccctcacccgcagctgcctgtatcacaaaagcgaagatcagcttcggcgcacgctggaagacgcggaggctctcttcagtaaatactgcgcgctgactcttaaggactagtttcgcgccctttctcaaatttaagcgcgaaaactacgtcatctccagcggccacacccggcgccagcacctgttgtcagcgccattttttagggcggagtaacttgtatgtgttgggaattgtagttttcttaaaatgggaagtgacgtaacgtgggaaaacggaagtgacgatttgaggaagttgtgggttttttggctttcgtttctgggcgtaggttcgcgtgcggttttctgggtgttttttgtggactttaaccgttacgtcattttttagtcctatatatactcgctctgcacttggcccttttttacactgtgactgattgagctggtgccgtgtcgagtggtgtttttttaataggttttcttttttactggtaaggctgactgttatgactacgtccggcgttccatttggcatgacactacgaccaacacgatctcggttgtctcggcgcactccgtacagtagggatcgtctacctccttttgagacagaaacccgcgctaccatactggaggatcatccgctgctgcccgaatgtaacactttgacaatgcacaacgtgagttacgtgcgaggtcttccctgcagtgtgggatttacgctgattcaggaatgggttgttccctgggatatggttctaacgcgggaggagcttgtaatcctgaggaagtgtatgcacgtgtgcctgtgttgtgccaacattgatatcatgacgagcatgatgatccatggttacgagtcctgggctctccactgtcattgttccagtcccggttccctgcagtgtatagccggcgggcaggttttggccagctggtttaggatggtggtggatggcgccatgtttaatcagaggtttatatggtaccgggaggtggtgaattacaacatgccaaaagaggtaatgtttatgtccagcgtgtttatgaggggtcgccacttaatctacctgcgcttgtggtatgatggccacgtgggttctgtggtccccgccatgagctttggatacagcgccttgcactgtgggattttgaacaatattgtggtgctgtgctgcagttactgtgctgatttaagtgagatcagggtgcgctgctgtgcccggaggacaaggcgccttatgctgcgggcggtgcgaatcatcgctgaggagaccactgccatgttgtattcctgcaggacggagcggcggcggcagcagtttattcgcgcgctgctgcagcaccaccgccctatcctgatgcacgattatgactctacccccatgtaggcgtggacttctccttcgccgcccgttaagcaaccgcaagttggacagcagcctgtggctcagcagctggacagcgacatgaacttaagtgagctgcccggggagtttattaatatcactgatgagcgtttggctcgacaggaaaccgtgtggaatataacacctaagaatatgtctgttacccatgatatgatgctttttaaggccagccggggagaaaggactgtgtactctgtgtgttgggagggaggtggcaggttgaatactagggttctgtgagtttgattaaggtacggtgatctgtataagctatgtggtggtggggctatactactgaatgaaaaatgacttgaaattttctgcaattgaaaaataaacacgttgaaacataacacaaacgattctttattcttgggcaatgtatgaaaaagtgtaagaggatgtggcaaatatttcattaatgtagttgtggccagaccagtcccatgaaaatgacatagagtatgcacttggagttgtgtctcctgtttcctgtgtaccgtttagtgtaatggttagtgttacaggtttagttttgtctccgtttaagtaaacttgactgacaatgttacttttggcagttttaccgtgagattttggataagctgataggttaggcataaatccaacagcgtttgtataggctgtcgcccctcctgacgcggtaggaggaggggagggtgccctgcatgtctgccgctgctcttgctcttgccgctgctgaggaggggggcgcatctgccgcagcaccggatgcatctgggaaaagcaaaaaaggggctcgtccctgtttccggaggaatttgcaagcggggtcttgcatgacggggaggcaaacccccgttcgccgcagtccggccggtccgagactcgaaccgggggtcccgcgactcaacccttggaaaataaccctccggctacagggagcgagccacttaatgctttcgctttccagcctaaccgcttacgctgcgcgcggccagtggccaaaaaagctagcgcagcagccgccgcgcctggaaggaagccaaaaggagcactcccccgttgtctgacgtcgcacacctgggttcgacacgcgggcggtaaccgcatggatcacggcggacggccggatacggggctcgaaccccggtcgtccgccatgatacccttgcgaatttatccaccagaccacggaagagtgcccgcttacaggctctccttttgcacggtctagagcgtcaacgattgcgcgcgcctgaccggccagagcgtcccgaccatggagcactttttgccgctgcgcaacatctggaaccgcgtccgcgactttccgcgcgcctccaccaccgccgccggcatcacctggatgtccaggtacatctacggata

SEQ ID NO: 81 - DNA, 9819 bp, synthetic construct
  source 1..9819: mol_type = other DNA
atgccggggttttacgagattgtgattaaggtccccagcgaccttgacgagcatctgcccggcatttctgacagctttgtgaactgggtggccgagaaggaatgggagttgccgccagattctgacatggatctgaatctgattgagcaggcacccctgaccgtggccgagaagctgcagcgcgactttctgacggaatggcgccgtgtgagtaaggccccggaggctcttttctttgtgcaatttgagaagggagagagctacttccacatgcacgtgctcgtggaaaccaccggggtgaaatccatggttttgggacgtttcctgagtcagattcgcgaaaaactgattcagagaatttaccgcgggatcgagccgactttgccaaactggttcgcggtcacaaagaccagaaatggcgccggaggcgggaacaaggtggtggatgagtgctacatccccaattacttgctccccaaaacccagcctgagctccagtgggcgtggactaatatggaacagtatttaagcgcctgtttgaatctcacggagcgtaaacggttggtggcgcagcatctgacgcacgtgtcgcagacgcaggagcagaacaaagagaatcagaatcccaattctgatgcgccggtgatcagatcaaaaacttcagccaggtacatggagctggtcgggtggctcgtggacaaggggattacctcggagaagcagtggatccaggaggaccaggcctcatacatctccttcaatgcggcctccaactcgcggtcccaaatcaaggctgccttggacaatgcgggaaagattatgagcctgactaaaaccgcccccgactacctggtgggccagcagcccgtggaggacatttccagcaatcggatttataaaattttggaactaaacgggtacgatccccaatatgcggcttccgtctttctgggatgggccacgaaaaagttcggcaagaggaacaccatctggctgtttgggcctgcaactaccgggaagaccaacatcgcggaggccatagcccacactgtgcccttctacgggtgcgtaaactggaccaatgagaactttcccttcaacgactgtgtcgacaagatggtgatctggtgggaggaggggaagatgaccgccaaggtcgtggagtcggccaaagccattctcggaggaagcaaggtgcgcgtggaccagaaatgcaagtcctcggcccagatagacccgactcccgtgatcgtcacctccaacaccaacatgtgcgccgtgattgacgggaactcaacgaccttcgaacaccagcagccgttgcaagaccggatgttcaaatttgaactcacccgccgtctggatcatgactttgggaaggtcaccaagcaggaagtcaaagactttttccggtgggcaaaggatcacgtggttgaggtggagcatgaattctacgtcaaaaagggtggagccaagaaaagacccgcccccagtgacgcagatataagtgagcccaaacgggtgcgcgagtcagttgcgcagccatcgacgtcagacgcggaagcttcgatcaactacgcagacaggtaccaaaacaaatgttctcgtcacgtgggcatgaatctgatgctgtttccctgcagacaatgcgagagaatgaatcagaattcaaatatctgcttcactcacggacagaaagactgtttagagtgctttcccgtgtcagaatctcaacccgtttctgtcgtcaaaaaggcgtatcagaaactgtgctacattcatcatatcatgggaaaggtgccagacgcttgcactgcctgcgatctggtcaatgtggatttggatgactgcatctttgaacaataaatgatttaaatcaggtatggctgccgatggttatcttccagattggctcgaggacaaccttagtgaaggaattcgcgagtggtgggctttgaaacctggagcccctcaacccaaggcaaatcaacaacatcaagacaacgctcgaggtcttgtgcttccgggttacaaataccttggacccggcaacggactcgacaagggggagccggtcaacgcagcagacgcggcggccctcgagcacgacaaggcctacgaccagcagctcaaggccggagacaacccgtacctcaagtacaaccacgccgacgccgagttccaggagcggctcaaagaagatacgtcttttgggggcaacctcgggcgagcagtcttccaggccaaaaagaggcttcttgaacctcttggtctggttgaggaagcggctaagacggctcctggaaagaagaggcctgtagagcagtctcctcaggaaccggactcctccgcgggtattggcaaatcgggtgcacagcccgctaaaaagagactcaatttcggtcagactggcgacacagagtcagtcccagaccctcaaccaatcggagaacctcccgcagccccctcaggtgtgggatctcttacaatggcttcaggtggtggcgcaccagtggcagacaataacgaaggtgccgatggagtgggtagttcctcgggaaattggcattgcgattcccaatggctgggggacagagtcatcaccaccagcacccgaacctgggccctgcccacctacaacaatcacctctacaagcaaatctccaacagcacatctggaggatcttcaaatgacaacgcctacttcggctacagcaccccctgggggtattttgacttcaacagattccactgccacttctcaccacgtgactggcagcgactcatcaacaacaactggggattccggcctaagcgactcaacttcaagctcttcaacattcaggtcaaagaggttacggacaacaatggagtcaagaccatcgccaataaccttaccagcacggtccaggtcttcacggactcagactatcagctcccgtacgtgctcgggtcggctcacgagggctgcctcccgccgttcccagcggacgttttcatgattcctcagtacgggtatctgacgcttaatgatggaagccaggccgtgggtcgttcgtccttttactgcctggaatatttcccgtcgcaaatgctaagaacgggtaacaacttccagttcagctacgagtttgagaacgtacctttccatagcagctacgctcacagccaaagcctggaccgactaatgaatccactcatcgaccaatacttgtactatctctcaaagactattaacggttctggacagaatcaacaaacgctaaaattcagtgtggccggacccagcaacatggctgtccagggaagaaactacatacctggacccagctaccgacaacaacgtgtctcaaccactgtgactcaaaacaacaacagcgaatttgcttggcctggagcttcttcttgggctctcaatggacgtaatagcttgatgaatcctggacctgctatggccagccacaaagaaggagaggaccgtttctttcctttgtctggatctttaatttttggcaaacaaggaactggaagagacaacgtggatgcggacaaagtcatgataaccaacgaagaagaaattaaaactactaacccggtagcaacggagtcctatggacaagtggccacaaaccaccagagtgcccaagcacaggcgcagaccggctgggttcaaaaccaaggaatacttccgggtatggtttggcaggacagagatgtgtacctgcaaggacccatttgggccaaaattcctcacacggacggcaactttcacccttctccgctgatgggagggtttggaatgaagcacccgcctcctcagatcctcatcaaaaacacacctgtacctgcggatcctccaacggccttcaacaaggacaagctgaactctttcatcacccagtattctactggccaagtcagcgtggagatcgagtgggagctgcagaaggaaaacagcaagcgctggaacccggagatccagtacacttccaactattacaagtctaataatgttgaatttgctgttaatactgaaggtgtatatagtgaaccccgccccattggcaccagatacctgactcgtaatctgtaattgcctgttaatcaataaaccggttgattcgtttcagttgaactttggtctctgcgaagggcgaattcgtttaaacctgcaggactagagccgaattctgcatcgcgatagggataacagggtaataaataatgtactagagacactttcaataaaggcaaatgcttttatttgtacactctcgggtgattatttacccccacccttgccgtctgcgccgtttaaaaatcaaaggggttctgccgcgcatcgctatgcgccactggcagggacacgttgcgatactggtgtttagtgctccacttaaactcaggcacaaccatccgcggcagctcggtgaagttttcactccacaggctgcgcaccatcaccaacgcgtttagcaggtcgggcgccgatatcttgaagtcgcagttggggcctccgccctgcgcgcgcgagttgcgatacacagggttgcagcactggaacactatcagcgccgggtggtgcacgctggccagcacgctcttgtcggagatcagatccgcgtccaggtcctccgcgttgctcagggcgaacggagtcaactttggtagctgccttcccaaaaagggcgcgtgcccaggctttgagttgcactcgcaccgtagtggcatcaaaaggtgaccgtgcccggtctgggcgttaggatacagcgcctgcataaaagccttgatctgcttaaaagccacctgagcctttgcgccttcagagaagaacatgccgcaagacttgccggaaaactgattggccggacaggccgcgtcgtgcacgcagcaccttgcgtcggtgttggagatctgcaccacatttcggccccaccggttcttcacgatcttggccttgctagactgctccttcagcgcgcgctgcccgttttcgctcgtcacatccatttcaatcacgtgctccttatttatcataatgcttccgtgtagacacttaagctcgccttcgatctcagcgcagcggtgcagccacaacgcgcagcccgtgggctcgtgatgcttgtaggtcacctctgcaaacgactgcaggtacgcctgcaggaatcgccccatcatcgtcacaaaggtcttgttgctggtgaaggtcagctgcaacccgcggtgctcctcgttcagccaggtcttgcatacggccgccagagcttccacttggtcaggcagtagtttgaagttcgcctttagatcgttatccacgtggtacttgtccatcagcgcgcgcgcagcctccatgcccttctcccacgcagacacgatcggcacactcagcgggttcatcaccgtaatttcactttccgcttcgctgggctcttcctcttcctcttgcgtccgcataccacgcgccactgggtcgtcttcattcagccgccgcactgtgcgcttacctcctttgccatgcttgattagcaccggtgggttgctgaaacccaccatttgtagcgccacatcttctctttcttcctcgctgtccacgattacctctggtgatggcgggcgctcgggcttgggagaagggcgcttctttttcttcttgggcgcaatggccaaatccgccgccgaggtcgatggccgcgggctgggtgtgcgcggcaccagcgcgtcttgtgatgagtcttcctcgtcctcggactcgatacgccgcctcatccgcttttttgggggcgcccggggaggcggcggcgacggggacggggacgacacgtcctccatggttgggggacgtcgcgccgcaccgcgtccgcgctcgggggtggtttcgcgctgctcctcttcccgactggccatttccttctcctataggcagaaaaagatcgttgaaactcactccggggctgtggacgtcggcttaccttcgcaaatttgtacctgaggactaccacgcccacgagattaggttctacgaagaccaatcccgcccgcctaatgcggagcttaccgcctgcgtcattacccagggccacattcttggccaattgcaagccatcaacaaagcccgccaagagtttctgctacgaaagggacggggggtttacttggacccccagtccggcgaggagctcaacccaatccccccgccgccgcagccctatcagcagcagccgcgggcccttgcttcccaggatggcacccaaaaagaagctgcagctgccgccgccacccacggacgaggaggaatactgggacagtcaggcagaggaggttttggacgaggaggaggaggacatgatggaagactgggagagcctagacgaggaagcttccgaggtcgaagaggtgtcagacgaaacaccgtcaccctcggtcgcattcccctcgccggcgccccagaaatcggcaaccggttccagcatggctacaacctccgctcctcaggcgccgccggcactgcccgttcgccgacccaaccgtagatgggacaccactggaaccagggccggtaagtccaagcagccgccgccgttagcccaagagcaacaacagcgccaaggctaccgctcatggcgcgggcacaagaacgccatagttgcttgcttgcaagactgtgggggcaacatctccttcgcccgccgctttcttctctaccatcacggcgtggccttcccccgtaacatcctgcattactaccgtcatctctacagcccatactgcaccggcggcagcggcagcaacagcagcggccacacagaagcaaaggcgaccggatagcaagactctgacaaagcccaagaaatccacagcggcggcagcagcaggaggaggagcgctgcgtctggcgcccaacgaacccgtatcgacccgcgagcttagaaacaggatttttcccactctgtatgctatatttcaacagagcaggggccaagaacaagagctgaaaataaaaaacaggtctctgcgatccctcacccgcagctgcctgtatcacaaaagcgaagatcagcttcggcgcacgctggaagacgcggaggctctcttcagtaaatactgcgcgctgactcttaaggactagtttcgcgccctttctcaaatttaagcgcgaaaactacgtcatctccagcggccacacccggcgccagcacctgttgtcagcgccattttttagggcggagtaacttgtatgtgttgggaattgtagttttcttaaaatgggaagtgacgtaacgtgggaaaacggaagtgacgatttgaggaagttgtgggttttttggctttcgtttctgggcgtaggttcgcgtgcggttttctgggtgttttttgtggactttaaccgttacgtcattttttagtcctatatatactcgctctgcacttggcccttttttacactgtgactgattgagctggtgccgtgtcgagtggtgtttttttaataggttttcttttttactggtaaggctgactgttatgactacgtccggcgttccatttggcatgacactacgaccaacacgatctcggttgtctcggcgcactccgtacagtagggatcgtctacctccttttgagacagaaacccgcgctaccatactggaggatcatccgctgctgcccgaatgtaacactttgacaatgcacaacgtgagttacgtgcgaggtcttccctgcagtgtgggatttacgctgattcaggaatgggttgttccctgggatatggttctaacgcgggaggagcttgtaatcctgaggaagtgtatgcacgtgtgcctgtgttgtgccaacattgatatcatgacgagcatgatgatccatggttacgagtcctgggctctccactgtcattgttccagtcccggttccctgcagtgtatagccggcgggcaggttttggccagctggtttaggatggtggtggatggcgccatgtttaatcagaggtttatatggtaccgggaggtggtgaattacaacatgccaaaagaggtaatgtttatgtccagcgtgtttatgaggggtcgccacttaatctacctgcgcttgtggtatgatggccacgtgggttctgtggtccccgccatgagctttggatacagcgccttgcactgtgggattttgaacaatattgtggtgctgtgctgcagttactgtgctgatttaagtgagatcagggtgcgctgctgtgcccggaggacaaggcgccttatgctgcgggcggtgcgaatcatcgctgaggagaccactgccatgttgtattcctgcaggacggagcggcggcggcagcagtttattcgcgcgctgctgcagcaccaccgccctatcctgatgcacgattatgactctacccccatgtaggcgtggacttctccttcgccgcccgttaagcaaccgcaagttggacagcagcctgtggctcagcagctggacagcgacatgaacttaagtgagctgcccggggagtttattaatatcactgatgagcgtttggctcgacaggaaaccgtgtggaatataacacctaagaatatgtctgttacccatgatatgatgctttttaaggccagccggggagaaaggactgtgtactctgtgtgttgggagggaggtggcaggttgaatactagggttctgtgagtttgattaaggtacggtgatctgtataagctatgtggtggtggggctatactactgaatgaaaaatgacttgaaattttctgcaattgaaaaataaacacgttgaaacataacacaaacgattctttattcttgggcaatgtatgaaaaagtgtaagaggatgtggcaaatatttcattaatgtagttgtggccagaccagtcccatgaaaatgacatagagtatgcacttggagttgtgtctcctgtttcctgtgtaccgtttagtgtaatggttagtgttacaggtttagttttgtctccgtttaagtaaacttgactgacaatgttacttttggcagttttaccgtgagattttggataagctgataggttaggcataaatccaacagcgtttgtataggctgtcgcccctcctgacgcggtaggaggaggggagggtgccctgcatgtctgccgctgctcttgctcttgccgctgctgaggaggggggcgcatctgccgcagcaccggatgcatctgggaaaagcaaaaaaggggctcgtccctgtttccggaggaatttgcaagcggggtcttgcatgacggggaggcaaacccccgttcgccgcagtccggccggtccgagactcgaaccgggggtcccgcgactcaacccttggaaaataaccctccggctacagggagcgagccacttaatgctttcgctttccagcctaaccgcttacgctgcgcgcggccagtggccaaaaaagctagcgcagcagccgccgcgcctggaaggaagccaaaaggagcactcccccgttgtctgacgtcgcacacctgggttcgacacgcgggcggtaaccgcatggatcacggcggacggccggatacggggctcgaaccccggtcgtccgccatgatacccttgcgaatttatccaccagaccacggaagagtgcccgcttacaggctctccttttgcacggtctagagcgtcaacgattgcgcgcgcctgaccggccagagcgtcccgaccatggagcactttttgccgctgcgcaacatctggaaccgcgtccgcgactttccgcgcgcctccaccaccgccgccggcatcacctggatgtccaggtacatctacggata

SEQ ID NO: 82 - DNA, 9816 bp, synthetic construct
  source 1..9816: mol_type = other DNA
atgccggggttttacgagattgtgattaaggtccccagcgaccttgacgagcatctgcccggcatttctgacagctttgtgaactgggtggccgagaaggaatgggagttgccgccagattctgacatggatctgaatctgattgagcaggcacccctgaccgtggccgagaagctgcagcgcgactttctgacggaatggcgccgtgtgagtaaggccccggaggctcttttctttgtgcaatttgagaagggagagagctacttccacatgcacgtgctcgtggaaaccaccggggtgaaatccatggttttgggacgtttcctgagtcagattcgcgaaaaactgattcagagaatttaccgcgggatcgagccgactttgccaaactggttcgcggtcacaaagaccagaaatggcgccggaggcgggaacaaggtggtggatgagtgctacatccccaattacttgctccccaaaacccagcctgagctccagtgggcgtggactaatatggaacagtatttaagcgcctgtttgaatctcacggagcgtaaacggttggtggcgcagcatctgacgcacgtgtcgcagacgcaggagcagaacaaagagaatcagaatcccaattctgatgcgccggtgatcagatcaaaaacttcagccaggtacatggagctggtcgggtggctcgtggacaaggggattacctcggagaagcagtggatccaggaggaccaggcctcatacatctccttcaatgcggcctccaactcgcggtcccaaatcaaggctgccttggacaatgcgggaaagattatgagcctgactaaaaccgcccccgactacctggtgggccagcagcccgtggaggacatttccagcaatcggatttataaaattttggaactaaacgggtacgatccccaatatgcggcttccgtctttctgggatgggccacgaaaaagttcggcaagaggaacaccatctggctgtttgggcctgcaactaccgggaagaccaacatcgcggaggccatagcccacactgtgcccttctacgggtgcgtaaactggaccaatgagaactttcccttcaacgactgtgtcgacaagatggtgatctggtgggaggaggggaagatgaccgccaaggtcgtggagtcggccaaagccattctcggaggaagcaaggtgcgcgtggaccagaaatgcaagtcctcggcccagatagacccgactcccgtgatcgtcacctccaacaccaacatgtgcgccgtgattgacgggaactcaacgaccttcgaacaccagcagccgttgcaagaccggatgttcaaatttgaactcacccgccgtctggatcatgactttgggaaggtcaccaagcaggaagtcaaagactttttccggtgggcaaaggatcacgtggttgaggtggagcatgaattctacgtcaaaaagggtggagccaagaaaagacccgcccccagtgacgcagatataagtgagcccaaacgggtgcgcgagtcagttgcgcagccatcgacgtcagacgcggaagcttcgatcaactacgcagacaggtaccaaaacaaatgttctcgtcacgtgggcatgaatctgatgctgtttccctgcagacaatgcgagagaatgaatcagaattcaaatatctgcttcactcacggacagaaagactgtttagagtgctttcccgtgtcagaatctcaacccgtttctgtcgtcaaaaaggcgtatcagaaactgtgctacattcatcatatcatgggaaaggtgccagacgcttgcactgcctgcgatctggtcaatgtggatttggatgactgcatctttgaacaataaatgatttaaatcaggtatggctgccgatggttatcttccagattggctcgaggacactctctctgaaggaataagacagtggtggaagctcaaacctggcccaccaccaccaaagcccgcagagcggcataaggacgacagcaggggtcttgtgcttcctgggtacaagtacctcggacccttcaacggactcgacaagggagagccggtcaacgaggcagacgccgcggccctcgagcacgacaaagcctacgaccggcagctcgacagcggagacaacccgtacctcaagtacaaccacgccgacgcggagtttcaggagcgccttaaagaagatacgtcttttgggggcaacctcggacgagcagtcttccaggcgaaaaagagggttcttgaacctctgggcctggttgaggaacctgttaagacggctccgggaaaaaagaggccggtagagcactctcctgtggagccagactcctcctcgggaaccggaaaggcgggccagcagcctgcaagaaaaagattgaattttggtcagactggagacgcagactcagtacctgacccccagcctctcggacagccaccagcagccccctctggtctgggaactaatacgatggctacaggcagtggcgcaccaatggcagacaataacgagggcgccgacggagtgggtaattcctcgggaaattggcattgcgattccacatggatgggcgacagagtcatcaccaccagcacccgaacctgggccctgcccacctacaacaaccacctctacaaacaaatttccagccaatcaggagcctcgaacgacaatcactactttggctacagcaccccttgggggtattttgacttcaacagattccactgccacttttcaccacgtgactggcaaagactcatcaacaacaactggggattccgacccaagagactcaacttcaagctctttaacattcaagtcaaagaggtcacgcagaatgacggtacgacgacgattgccaataaccttaccagcacggttcaggtgtttactgactcggagtaccagctcccgtacgtcctcggctcggcgcatcaaggatgcctcccgccgttcccagcagacgtcttcatggtgccacagtatggatacctcaccctgaacaacgggagtcaggcagtaggacgctcttcattttactgcctggagtactttccttctcagatgctgcgtaccggaaacaactttaccttcagctacacttttgaggacgttcctttccacagcagctacgctcacagccagagtctggaccgtctcatgaatcctctcatcgaccagtacctgtattacttgagcagaacaaacactccaagtggaaccaccacgcagtcaaggcttcagttttctcaggccggagcgagtgacattcgggaccagtctaggaactggcttcctggaccctgttaccgccagcagcgagtatcaaagacatctgcggataacaacaacagtgaatactcgtggactggagctaccaagtaccacctcaatggcagagactctctggtgaatccgggcccggccatggcaagccacaaggacgatgaagaaaagttttttcctcagagcggggttctcatctttgggaagcaaggctcagagaaaacaaatgtggacattgaaaaggtcatgattacagacgaagaggaaatcaggacaaccaatcccgtggctacggagcagtatggttctgtatctaccaacctccagagaggcaacagacaagcagctaccgcagatgtcaacacacaaggcgttcttccaggcatggtctggcaggacagagatgtgtaccttcaggggcccatctgggcaaagattccacacacggacggacattttcacccctctcccctcatgggtggattcggacttaaacaccctcctccacagattctcatcaagaacaccccggtacctgcgaatccttcgaccaccttcagtgcggcaaagtttgcttccttcatcacacagtactccacgggacaggtcagcgtggagatcgagtgggagctgcagaaggaaaacagcaaacgctggaatcccgaaattcagtacacttccaactacaacaagtctgttaatgtggactttactgtggacactaatggcgtgtattcagagcctcgccccattggcaccagatacctgactcgtaatctgtaattgcctgttaatcaataaaccggttgattcgtttcagttgaactttggtctctgcgaagggcgaattcgtttaaacctgcaggactagagccgaattctgcatcgcgatagggataacagggtaataaataatgtactagagacactttcaataaaggcaaatgcttttatttgtacactctcgggtgattatttacccccacccttgccgtctgcgccgtttaaaaatcaaaggggttctgccgcgcatcgctatgcgccactggcagggacacgttgcgatactggtgtttagtgctccacttaaactcaggcacaaccatccgcggcagctcggtgaagttttcactccacaggctgcgcaccatcaccaacgcgtttagcaggtcgggcgccgatatcttgaagtcgcagttggggcctccgccctgcgcgcgcgagttgcgatacacagggttgcagcactggaacactatcagcgccgggtggtgcacgctggccagcacgctcttgtcggagatcagatccgcgtccaggtcctccgcgttgctcagggcgaacggagtcaactttggtagctgccttcccaaaaagggcgcgtgcccaggctttgagttgcactcgcaccgtagtggcatcaaaaggtgaccgtgcccggtctgggcgttaggatacagcgcctgcataaaagccttgatctgcttaaaagccacctgagcctttgcgccttcagagaagaacatgccgcaagacttgccggaaaactgattggccggacaggccgcgtcgtgcacgcagcaccttgcgtcggtgttggagatctgcaccacatttcggccccaccggttcttcacgatcttggccttgctagactgctccttcagcgcgcgctgcccgttttcgctcgtcacatccatttcaatcacgtgctccttatttatcataatgcttccgtgtagacacttaagctcgccttcgatctcagcgcagcggtgcagccacaacgcgcagcccgtgggctcgtgatgcttgtaggtcacctctgcaaacgactgcaggtacgcctgcaggaatcgccccatcatcgtcacaaaggtcttgttgctggtgaaggtcagctgcaacccgcggtgctcctcgttcagccaggtcttgcatacggccgccagagcttccacttggtcaggcagtagtttgaagttcgcctttagatcgttatccacgtggtacttgtccatcagcgcgcgcgcagcctccatgcccttctcccacgcagacacgatcggcacactcagcgggttcatcaccgtaatttcactttccgcttcgctgggctcttcctcttcctcttgcgtccgcataccacgcgccactgggtcgtcttcattcagccgccgcactgtgcgcttacctcctttgccatgcttgattagcaccggtgggttgctgaaacccaccatttgtagcgccacatcttctctttcttcctcgctgtccacgattacctctggtgatggcgggcgctcgggcttgggagaagggcgcttctttttcttcttgggcgcaatggccaaatccgccgccgaggtcgatggccgcgggctgggtgtgcgcggcaccagcgcgtcttgtgatgagtcttcctcgtcctcggactcgatacgccgcctcatccgcttttttgggggcgcccggggaggcggcggcgacggggacggggacgacacgtcctccatggttgggggacgtcgcgccgcaccgcgtccgcgctcgggggtggtttcgcgctgctcctcttcccgactggccatttccttctcctataggcagaaaaagatcgttgaaactcactccggggctgtggacgtcggcttaccttcgcaaatttgtacctgaggactaccacgcccacgagattaggttctacgaagaccaatcccgcccgcctaatgcggagcttaccgcctgcgtcattacccagggccacattcttggccaattgcaagccatcaacaaagcccgccaagagtttctgctacgaaagggacggggggtttacttggacccccagtccggcgaggagctcaacccaatccccccgccgccgcagccctatcagcagcagccgcgggcccttgcttcccaggatggcacccaaaaagaagctgcagctgccgccgccacccacggacgaggaggaatactgggacagtcaggcagaggaggttttggacgaggaggaggaggacatgatggaagactgggagagcctagacgaggaagcttccgaggtcgaagaggtgtcagacgaaacaccgtcaccctcggtcgcattcccctcgccggcgccccagaaatcggcaaccggttccagcatggctacaacctccgctcctcaggcgccgccggcactgcccgttcgccgacccaaccgtagatgggacaccactggaaccagggccggtaagtccaagcagccgccgccgttagcccaagagcaacaacagcgccaaggctaccgctcatggcgcgggcacaagaacgccatagttgcttgcttgcaagactgtgggggcaacatctccttcgcccgccgctttcttctctaccatcacggcgtggccttcccccgtaacatcctgcattactaccgtcatctctacagcccatactgcaccggcggcagcggcagcaacagcagcggccacacagaagcaaaggcgaccggatagcaagactctgacaaagcccaagaaatccacagcggcggcagcagcaggaggaggagcgctgcgtctggcgcccaacgaacccgtatcgacccgcgagcttagaaacaggatttttcccactctgtatgctatatttcaacagagcaggggccaagaacaagagctgaaaataaaaaacaggtctctgcgatccctcacccgcagctgcctgtatcacaaaagcgaagatcagcttcggcgcacgctggaagacgcggaggctctcttcagtaaatactgcgcgctgactcttaaggactagtttcgcgccctttctcaaatttaagcgcgaaaactacgtcatctccagcggccacacccggcgccagcacctgttgtcagcgccattttttagggcggagtaacttgtatgtgttgggaattgtagttttcttaaaatgggaagtgacgtaacgtgggaaaacggaagtgacgatttgaggaagttgtgggttttttggctttcgtttctgggcgtaggttcgcgtgcggttttctgggtgttttttgtggactttaaccgttacgtcattttttagtcctatatatactcgctctgcacttggcccttttttacactgtgactgattgagctggtgccgtgtcgagtggtgtttttttaataggttttcttttttactggtaaggctgactgttatgactacgtccggcgttccatttggcatgacactacgaccaacacgatctcggttgtctcggcgcactccgtacagtagggatcgtctacctccttttgagacagaaacccgcgctaccatactggaggatcatccgctgctgcccgaatgtaacactttgacaatgcacaacgtgagttacgtgcgaggtcttccctgcagtgtgggatttacgctgattcaggaatgggttgttccctgggatatggttctaacgcgggaggagcttgtaatcctgaggaagtgtatgcacgtgtgcctgtgttgtgccaacattgatatcatgacgagcatgatgatccatggttacgagtcctgggctctccactgtcattgttccagtcccggttccctgcagtgtatagccggcgggcaggttttggccagctggtttaggatggtggtggatggcgccatgtttaatcagaggtttatatggtaccgggaggtggtgaattacaacatgccaaaagaggtaatgtttatgtccagcgtgtttatgaggggtcgccacttaatctacctgcgcttgtggtatgatggccacgtgggttctgtggtccccgccatgagctttggatacagcgccttgcactgtgggattttgaacaatattgtggtgctgtgctgcagttactgtgctgatttaagtgagatcagggtgcgctgctgtgcccggaggacaaggcgccttatgctgcgggcggtgcgaatcatcgctgaggagaccactgccatgttgtattcctgcaggacggagcggcggcggcagcagtttattcgcgcgctgctgcagcaccaccgccctatcctgatgcacgattatgactctacccccatgtaggcgtggacttctccttcgccgcccgttaagcaaccgcaagttggacagcagcctgtggctcagcagctggacagcgacatgaacttaagtgagctgcccggggagtttattaatatcactgatgagcgtttggctcgacaggaaaccgtgtggaatataacacctaagaatatgtctgttacccatgatatgatgctttttaaggccagccggggagaaaggactgtgtactctgtgtgttgggagggaggtggcaggttgaatactagggttctgtgagtttgattaaggtacggtgatctgtataagctatgtggtggtggggctatactactgaatgaaaaatgacttgaaattttctgcaattgaaaaataaacacgttgaaacataacacaaacgattctttattcttgggcaatgtatgaaaaagtgtaagaggatgtggcaaatatttcattaatgtagttgtggccagaccagtcccatgaaaatgacatagagtatgcacttggagttgtgtctcctgtttcctgtgtaccgtttagtgtaatggttagtgttacaggtttagttttgtctccgtttaagtaaacttgactgacaatgttacttttggcagttttaccgtgagattttggataagctgataggttaggcataaatccaacagcgtttgtataggctgtcgcccctcctgacgcggtaggaggaggggagggtgccctgcatgtctgccgctgctcttgctcttgccgctgctgaggaggggggcgcatctgccgcagcaccggatgcatctgggaaaagcaaaaaaggggctcgtccctgtttccggaggaatttgcaagcggggtcttgcatgacggggaggcaaacccccgttcgccgcagtccggccggtccgagactcgaaccgggggtcccgcgactcaacccttggaaaataaccctccggctacagggagcgagccacttaatgctttcgctttccagcctaaccgcttacgctgcgcgcggccagtggccaaaaaagctagcgcagcagccgccgcgcctggaaggaagccaaaaggagcactcccccgttgtctgacgtcgcacacctgggttcgacacgcgggcggtaaccgcatggatcacggcggacggccggatacggggctcgaaccccggtcgtccgccatgatacccttgcgaatttatccaccagaccacggaagagtgcccgcttacaggctctccttttgcacggtctagagcgtcaacgattgcgcgcgcctgaccggccagagcgtcccgaccatggagcactttttgccgctgcgcaacatctggaaccgcgtccgcgactttccgcgcgcctccaccaccgccgccggcatcacctggatgtccaggtacatctacggata

SEQ ID NO: 83 - DNA, 9819 bp, synthetic construct
  source 1..9819: mol_type = other DNA
atgccggggttttacgagattgtgattaaggtccccagcgaccttgacgagcatctgcccggcatttctgacagctttgtgaactgggtggccgagaaggaatgggagttgccgccagattctgacatggatctgaatctgattgagcaggcacccctgaccgtggccgagaagctgcagcgcgactttctgacggaatggcgccgtgtgagtaaggccccggaggctcttttctttgtgcaatttgagaagggagagagctacttccacatgcacgtgctcgtggaaaccaccggggtgaaatccatggttttgggacgtttcctgagtcagattcgcgaaaaactgattcagagaatttaccgcgggatcgagccgactttgccaaactggttcgcggtcacaaagaccagaaatggcgccggaggcgggaacaaggtggtggatgagtgctacatccccaattacttgctccccaaaacccagcctgagctccagtgggcgtggactaatatggaacagtatttaagcgcctgtttgaatctcacggagcgtaaacggttggtggcgcagcatctgacgcacgtgtcgcagacgcaggagcagaacaaagagaatcagaatcccaattctgatgcgccggtgatcagatcaaaaacttcagccaggtacatggagctggtcgggtggctcgtggacaaggggattacctcggagaagcagtggatccaggaggaccaggcctcatacatctccttcaatgcggcctccaactcgcggtcccaaatcaaggctgccttggacaatgcgggaaagattatgagcctgactaaaaccgcccccgactacctggtgggccagcagcccgtggaggacatttccagcaatcggatttataaaattttggaactaaacgggtacgatccccaatatgcggcttccgtctttctgggatgggccacgaaaaagttcggcaagaggaacaccatctggctgtttgggcctgcaactaccgggaagaccaacatcgcggaggccatagcccacactgtgcccttctacgggtgcgtaaactggaccaatgagaactttcccttcaacgactgtgtcgacaagatggtgatctggtgggaggaggggaagatgaccgccaaggtcgtggagtcggccaaagccattctcggaggaagcaaggtgcgcgtggaccagaaatgcaagtcctcggcccagatagacccgactcccgtgatcgtcacctccaacaccaacatgtgcgccgtgattgacgggaactcaacgaccttcgaacaccagcagccgttgcaagaccggatgttcaaatttgaactcacccgccgtctggatcatgactttgggaaggtcaccaagcaggaagtcaaagactttttccggtgggcaaaggatcacgtggttgaggtggagcatgaattctacgtcaaaaagggtggagccaagaaaagacccgcccccagtgacgcagatataagtgagcccaaacgggtgcgcgagtcagttgcgcagccatcgacgtcagacgcggaagcttcgatcaactacgcagacaggtaccaaaacaaatgttctcgtcacgtgggcatgaatctgatgctgtttccctgcagacaatgcgagagaatgaatcagaattcaaatatctgcttcactcacggacagaaagactgtttagagtgctttcccgtgtcagaatctcaacccgtttctgtcgtcaaaaaggcgtatcagaaactgtgctacattcatcatatcatgggaaaggtgccagacgcttgcactgcctgcgatctggtcaatgtggatttggatgactgcatctttgaacaataaatgatttaaatcaggtatggctgccgatggttatcttccagattggctcgaggacaacctctctgagggcattcgcgagtggtgggacttgaaacctggagccccgaaacccaaagccaaccagcaaaagcaggacgacggccggggtctggtgcttcctggctacaagtacctcggacccttcaacggactcgacaagggggagcccgtcaacgcggcggatgcagcggccctcgagcacgacaaggcctacgaccagcagctcaaagcgggtgacaatccgtacctgcggtataaccacgccgacgccgagtttcaggagcgtctgcaagaagatacgtcttttgggggcaacctcgggcgagcagtcttccaggccaagaagagggttctcgaaccttttggtctggttgaggaaggtgctaagacggctcctggaaagaaacgtccggtagagcagtcgccacaagagccagactcctcctcgggcattggcaagacaggccagcagcccgctaaaaagagactcaattttggtcagactggcgactcagagtcagtccccgacccacaacctctcggagaacctccagcaacccccgctgctgtgggacctactacaatggcttcaggcggtggcgcaccaatggcagacaataacgaaggcgccgacggagtgggtaatgcctcaggaaattggcattgcgattccacatggctgggcgacagagtcatcaccaccagcacccgaacatgggccttgcccacctataacaaccacctctacaagcaaatctccagtgcttcaacgggggccagcaacgacaaccactacttcggctacagcaccccctgggggtattttgatttcaacagattccactgccatttctcaccacgtgactggcagcgactcatcaacaacaattggggattccggcccaagagactcaacttcaagctcttcaacatccaagtcaaggaggtcacgacgaatgatggcgtcacgaccatcgctaataaccttaccagcacggttcaagtcttctcggactcggagtaccagttgccgtacgtcctcggctctgcgcaccagggctgcctccctccgttcccggcggacgtgttcatgattccgcagtacggctacctaacgctcaacaatggcagccaggcagtgggacggtcatccttttactgcctggaatatttcccatcgcagatgctgagaacgggcaataactttaccttcagctacaccttcgaggacgtgcctttccacagcagctacgcgcacagccagagcctggaccggctgatgaatcctctcatcgaccagtacctgtattacctgaacagaactcagaatcagtccggaagtgcccaaaacaaggacttgctgtttagccgggggtctccagctggcatgtctgttcagcccaaaaactggctacctggaccctgttaccggcagcagcgcgtttctaaaacaaaaacagacaacaacaacagcaactttacctggactggtgcttcaaaatataaccttaatgggcgtgaatctataatcaaccctggcactgctatggcctcacacaaagacgacaaagacaagttctttcccatgagcggtgtcatgatttttggaaaggagagcgccggagcttcaaacactgcattggacaatgtcatgatcacagacgaagaggaaatcaaagccactaaccccgtggccaccgaaagatttgggactgtggcagtcaatctccagagcagcagcacagaccctgcgaccggagatgtgcatgttatgggagccttacctggaatggtgtggcaagacagagacgtatacctgcagggtcctatttgggccaaaattcctcacacggatggacactttcacccgtctcctctcatgggcggctttggacttaagcacccgcctcctcagatcctcatcaaaaacacgcctgttcctgcgaatcctccggcagagttttcggctacaaagtttgcttcattcatcacccagtattccacaggacaagtgagcgtggagattgaatgggagctgcagaaagaaaacagcaaacgctggaatcccgaagtgcagtatacatctaactatgcaaaatctgccaacgttgatttcactgtggacaacaatggactttatactgagcctcgccccattggcacccgttacctcacccgtcccctgtaattgcctgttaatcaataaaccggttgattcgtttcagttgaactttggtctctgcgaagggcgaattcgtttaaacctgcaggactagagccgaattctgcatcgcgatagggataacagggtaataaataatgtactagagacactttcaataaaggcaaatgcttttatttgtacactctcgggtgattatttacccccacccttgccgtctgcgccgtttaaaaatcaaaggggttctgccgcgcatcgctatgcgccactggcagggacacgttgcgatactggtgtttagtgctccacttaaactcaggcacaaccatccgcggcagctcggtgaagttttcactccacaggctgcgcaccatcaccaacgcgtttagcaggtcgggcgccgatatcttgaagtcgcagttggggcctccgccctgcgcgcgcgagttgcgatacacagggttgcagcactggaacactatcagcgccgggtggtgcacgctggccagcacgctcttgtcggagatcagatccgcgtccaggtcctccgcgttgctcagggcgaacggagtcaactttggtagctgccttcccaaaaagggcgcgtgcccaggctttgagttgcactcgcaccgtagtggcatcaaaaggtgaccgtgcccggtctgggcgttaggatacagcgcctgcataaaagccttgatctgcttaaaagccacctgagcctttgcgccttcagagaagaacatgccgcaagacttgccggaaaactgattggccggacaggccgcgtcgtgcacgcagcaccttgcgtcggtgttggagatctgcaccacatttcggccccaccggttcttcacgatcttggccttgctagactgctccttcagcgcgcgctgcccgttttcgctcgtcacatccatttcaatcacgtgctccttatttatcataatgcttccgtgtagacacttaagctcgccttcgatctcagcgcagcggtgcagccacaacgcgcagcccgtgggctcgtgatgcttgtaggtcacctctgcaaacgactgcaggtacgcctgcaggaatcgccccatcatcgtcacaaaggtcttgttgctggtgaaggtcagctgcaacccgcggtgctcctcgttcagccaggtcttgcatacggccgccagagcttccacttggtcaggcagtagtttgaagttcgcctttagatcgttatccacgtggtacttgtccatcagcgcgcgcgcagcctccatgcccttctcccacgcagacacgatcggcacactcagcgggttcatcaccgtaatttcactttccgcttcgctgggctcttcctcttcctcttgcgtccgcataccacgcgccactgggtcgtcttcattcagccgccgcactgtgcgcttacctcctttgccatgcttgattagcaccggtgggttgctgaaacccaccatttgtagcgccacatcttctctttcttcctcgctgtccacgattacctctggtgatggcgggcgctcgggcttgggagaagggcgcttctttttcttcttgggcgcaatggccaaatccgccgccgaggtcgatggccgcgggctgggtgtgcgcggcaccagcgcgtcttgtgatgagtcttcctcgtcctcggactcgatacgccgcctcatccgcttttttgggggcgcccggggaggcggcggcgacggggacggggacgacacgtcctccatggttgggggacgtcgcgccgcaccgcgtccgcgctcgggggtggtttcgcgctgctcctcttcccgactggccatttccttctcctataggcagaaaaagatcgttgaaactcactccggggctgtggacgtcggcttaccttcgcaaatttgtacctgaggactaccacgcccacgagattaggttctacgaagaccaatcccgcccgcctaatgcggagcttaccgcctgcgtcattacccagggccacattcttggccaattgcaagccatcaacaaagcccgccaagagtttctgctacgaaagggacggggggtttacttggacccccagtccggcgaggagctcaacccaatccccccgccgccgcagccctatcagcagcagccgcgggcccttgcttcccaggatggcacccaaaaagaagctgcagctgccgccgccacccacggacgaggaggaatactgggacagtcaggcagaggaggttttggacgaggaggaggaggacatgatggaagactgggagagcctagacgaggaagcttccgaggtcgaagaggtgtcagacgaaacaccgtcaccctcggtcgcattcccctcgccggcgccccagaaatcggcaaccggttccagcatggctacaacctccgctcctcaggcgccgccggcactgcccgttcgccgacccaaccgtagatgggacaccactggaaccagggccggtaagtccaagcagccgccgccgttagcccaagagcaacaacagcgccaaggctaccgctcatggcgcgggcacaagaacgccatagttgcttgcttgcaagactgtgggggcaacatctccttcgcccgccgctttcttctctaccatcacggcgtggccttcccccgtaacatcctgcattactaccgtcatctctacagcccatactgcaccggcggcagcggcagcaacagcagcggccacacagaagcaaaggcgaccggatagcaagactctgacaaagcccaagaaatccacagcggcggcagcagcaggaggaggagcgctgcgtctggcgcccaacgaacccgtatcgacccgcgagcttagaaacaggatttttcccactctgtatgctatatttcaacagagcaggggccaagaacaagagctgaaaataaaaaacaggtctctgcgatccctcacccgcagctgcctgtatcacaaaagcgaagatcagcttcggcgcacgctggaagacgcggaggctctcttcagtaaatactgcgcgctgactcttaaggactagtttcgcgccctttctcaaatttaagcgcgaaaactacgtcatctccagcggccacacccggcgccagcacctgttgtcagcgccattttttagggcggagtaacttgtatgtgttgggaattgtagttttcttaaaatgggaagtgacgtaacgtgggaaaacggaagtgacgatttgaggaagttgtgggttttttggctttcgtttctgggcgtaggttcgcgtgcggttttctgggtgttttttgtggactttaaccgttacgtcattttttagtcctatatatactcgctctgcacttggcccttttttacactgtgactgattgagctggtgccgtgtcgagtggtgtttttttaataggttttcttttttactggtaaggctgactgttatgactacgtccggcgttccatttggcatgacactacgaccaacacgatctcggttgtctcggcgcactccgtacagtagggatcgtctacctccttttgagacagaaacccgcgctaccatactggaggatcatccgctgctgcccgaatgtaacactttgacaatgcacaacgtgagttacgtgcgaggtcttccctgcagtgtgggatttacgctgattcaggaatgggttgttccctgggatatggttctaacgcgggaggagcttgtaatcctgaggaagtgtatgcacgtgtgcctgtgttgtgccaacattgatatcatgacgagcatgatgatccatggttacgagtcctgggctctccactgtcattgttccagtcccggttccctgcagtgtatagccggcgggcaggttttggccagctggtttaggatggtggtggatggcgccatgtttaatcagaggtttatatggtaccgggaggtggtgaattacaacatgccaaaagaggtaatgtttatgtccagcgtgtttatgaggggtcgccacttaatctacctgcgcttgtggtatgatggccacgtgggttctgtggtccccgccatgagctttggatacagcgccttgcactgtgggattttgaacaatattgtggtgctgtgctgcagttactgtgctgatttaagtgagatcagggtgcgctgctgtgcccggaggacaaggcgccttatgctgcgggcggtgcgaatcatcgctgaggagaccactgccatgttgtattcctgcaggacggagcggcggcggcagcagtttattcgcgcgctgctgcagcaccaccgccctatcctgatgcacgattatgactctacccccatgtaggcgtggacttctccttcgccgcccgttaagcaaccgcaagttggacagcagcctgtggctcagcagctggacagcgacatgaacttaagtgagctgcccggggagtttattaatatcactgatgagcgtttggctcgacaggaaaccgtgtggaatataacacctaagaatatgtctgttacccatgatatgatgctttttaaggccagccggggagaaaggactgtgtactctgtgtgttgggagggaggtggcaggttgaatactagggttctgtgagtttgattaaggtacggtgatctgtataagctatgtggtggtggggctatactactgaatgaaaaatgacttgaaattttctgcaattgaaaaataaacacgttgaaacataacacaaacgattctttattcttgggcaatgtatgaaaaagtgtaagaggatgtggcaaatatttcattaatgtagttgtggccagaccagtcccatgaaaatgacatagagtatgcacttggagttgtgtctcctgtttcctgtgtaccgtttagtgtaatggttagtgttacaggtttagttttgtctccgtttaagtaaacttgactgacaatgttacttttggcagttttaccgtgagattttggataagctgataggttaggcataaatccaacagcgtttgtataggctgtcgcccctcctgacgcggtaggaggaggggagggtgccctgcatgtctgccgctgctcttgctcttgccgctgctgaggaggggggcgcatctgccgcagcaccggatgcatctgggaaaagcaaaaaaggggctcgtccctgtttccggaggaatttgcaagcggggtcttgcatgacggggaggcaaacccccgttcgccgcagtccggccggtccgagactcgaaccgggggtcccgcgactcaacccttggaaaataaccctccggctacagggagcgagccacttaatgctttcgctttccagcctaaccgcttacgctgcgcgcggccagtggccaaaaaagctagcgcagcagccgccgcgcctggaaggaagccaaaaggagcactcccccgttgtctgacgtcgcacacctgggttcgacacgcgggcggtaaccgcatggatcacggcggacggccggatacggggctcgaaccccggtcgtccgccatgatacccttgcgaatttatccaccagaccacggaagagtgcccgcttacaggctctccttttgcacggtctagagcgtcaacgattgcgcgcgcctgaccggccagagcgtcccgaccatggagcactttttgccgctgcgcaacatctggaaccgcgtccgcgactttccgcgcgcctccaccaccgccgccggcatcacctggatgtccaggtacatctacggata

SEQ ID NO: 84 - DNA, 9819 bp, synthetic construct; identical to SEQ ID NO: 81
  source 1..9819: mol_type = other DNA

SEQ ID NO: 85 - DNA, 9816 bp, synthetic construct; identical to SEQ ID NO: 82
  source 1..9816: mol_type = other DNA

SEQ ID NO: 86 - DNA, 9819 bp, synthetic construct; identical to SEQ ID NO: 83
  source 1..9819: mol_type = other DNA

SEQ ID NO: 87 - DNA, 14414 bp, synthetic construct
  source 1..14414: mol_type = other DNA
tcgcgcgtttcggtgatgacggtgaaaacctctgacacatgcagctcccggagacggtcacagcttgtctgtaagcggatgccgggagcagacaagcccgtcagggcgcgtcagcgggtgttggcgggtgtcggggctggcttaactatgcggcatcagagcagattgtactgagagtgcaccatatgcggtgtgaaataccgcacagatgcgtaaggagaaaataccgcatcaggcgccattcgccattcaggctgcgcaactgttgggaagggcgatcggtgcgggcctcttcgctattacgccagctggcgaaagggggatgtgctgcaaggcgattaagttgggtaacgccagggttttcccagtcacgacgttgtaaaacgacggccagagaattccgcagggtctccattttgaagcgggaggtttgaacgcgcagccgccatgccggggttttacgagattgtgattaaggtccccagcgaccttgacgagcatctgcccggcatttctgacagctttgtgaactgggtggccgagaaggaatgggagttgccgccagattctgacatggatctgaatctgattgagcaggcacccctgaccgtggccgagaagctgcagcgcgactttctgacggaatggcgccgtgtgagtaaggccccggaggctcttttctttgtgcaatttgagaagggagagagctacttccacatgcacgtgctcgtggaaaccaccggggtgaaatccatggttttgggacgtttcctgagtcagattcgcgaaaaactgattcagagaatttaccgcgggatcgagccgactttgccaaactggttcgcggtcacaaagaccagaaatggcgccggaggcgggaacaaggtggtggatgagtgctacatccccaattacttgctccccaaaacccagcctgagctccagtgggcgtggactaatatggaacagtatttaagcgcctgtttgaatctcacggagcgtaaacggttggtggcgcagcatctgacgcacgtgtcgcagacgcaggagcagaacaaagagaatcagaatcccaattctgatgcgccggtgatcagatcaaaaacttcagccaggtacatggagctggtcgggtggctcgtggacaaggggattacctcggagaagcagtggatccaggaggaccaggcctcatacatctccttcaatgcggcctccaactcgcggtcccaaatcaaggctgccttggacaatgcgggaaagattatgagcctgactaaaaccgcccccgactacctggtgggccagcagcccgtggaggacatttccagcaatcggatttataaaattttggaactaaacgggtacgatccccaatatgcggcttccgtctttctgggatgggccacgaaaaagttcggcaagaggaacaccatctggctgtttgggcctgcaactaccgggaagaccaacatcgcggaggccatagcccacactgtgcccttctacgggtgcgtaaactggaccaatgagaactttcccttcaacgactgtgtcgacaagatggtgatctggtgggaggaggggaagatgaccgccaaggtcgtggagtcggccaaagccattctcggaggaagcaaggtgcgcgtggaccagaaatgcaagtcctcggcccagatagacccgactcccgtgatcgtcacctccaacaccaacatgtgcgccgtgattgacgggaactcaacgaccttcgaacaccagcagccgttgcaagaccggatgttcaaatttgaactcacccgccgtctggatcatgactttgggaaggtcaccaagcaggaagtcaaagactttttccggtgggcaaaggatcacgtggttgaggtggagcatgaattctacgtcaaaaagggtggagccaagaaaagacccgcccccagtgacgcagatataagtgagcccaaacgggtgcgcgagtcagttgcgcagccatcgacgtcagacgcggaagcttcgatcaactacgcagacaggtaccaaaacaaatgttctcgtcacgtgggcatgaatctgatgctgtttccctgcagacaatgcgagagaatgaatcagaattcaaatatctgcttcactcacggacagaaagactgtttagagtgctttcccgtgtcagaatctcaacccgtttctgtcgtcaaaaaggcgtatcagaaactgtgctacattcatcatatcatgggaaaggtgccagacgcttgcactgcctgcgatctggtcaatgtggatttggatgactgcatctttgaacaataaatgatttaaatcaggtatggctgccgatggttatcttccagattggctcgaggacaacctctctgagggcattcgcgagtggtgggcgctgaaacctggagccccgaagcccaaagccaaccagcaaaagcaggacgacggccggggtctggtgcttcctggctacaagtacctcggacccttcaacggactcgacaagggggagcccgtcaacgcggcggacgcagcggccctcgagcacgacaaggcctacgaccagcagctgcaggcgggtgacaatccgtacctgcggtataaccacgccgacgccgagtttcaggagcgtctgcaagaagatacgtcttttgggggcaacctcgggcgagcagtcttccaggccaagaagcgggttctcgaacctctcggtctggttgaggaaggcgctaagacggctcctggaaagaagagaccggtagagccatcaccccagcgttctccagactcctctacgggcatcggcaagaaaggccaacagcccgccagaaaaagactcaattttggtcagactggcgactcagagtcagttccagaccctcaacctctcggagaacctccagcagcgccctctggtgtgggacctaatacaatggctgcaggcggtggcgcaccaatggcagacaataacgaaggcgccgacggagtgggtagttcctcgggaaattggcattgcgattccacatggctgggcgacagagtcatcaccaccagcacccgaacctgggccctgcccacctacaacaaccacctctacaagcaaatctccaacgggacatcgggaggagccaccaacgacaacacctacttcggctacagcaccccctgggggtattttgactttaacagattccactgccacttttcaccacgtgactggcagcgactcatcaacaacaactggggattccggcccaagagactcagcttcaagctcttcaacatccaggtcaaggaggtcacgcagaatgaaggcaccaagaccatcgccaataacctcaccagcaccatccaggtgtttacggactcggagtaccagctgccgtacgttctcggctctgcccaccagggctgcctgcctccgttcccggcggacgtgttcatgattccccagtacggctacctaacactcaacaacggtagtcaggccgtgggacgctcctccttctactgcctggaatactttccttcgcagatgctgagaaccggcaacaacttccagtttacttacaccttcgaggacgtgcctttccacagcagctacgcccacagccagagcttggaccggctgatgaatcctctgattgaccagtacctgtactacttgtctcggactcaaacaacaggaggcacggcaaatacgcagactctgggcttcagccaaggtgggcctaatacaatggccaatcaggcaaagaactggctgccaggaccctgttaccgccaacaacgcgtctcaacgacaaccgggcaaaacaacaatagcaactttgcctggactgctgggaccaaataccatctgaatggaagaaattcattggctaatcctggcatcgctatggcaacacacaaagacgacgaggagcgtttttttcccagtaacgggatcctgatttttggcaaacaaaatgctgccagagacaatgcggattacagcgatgtcatgctcaccagcgaggaagaaatcaaaaccactaaccctgtggctacagaggaatacggtatcgtggcagataacttgcagcagcaaaacacggctcctcaaattggaactgtcaacagccagggggccttacccggtatggtctggcagaaccgggacgtgtacctgcagggtcccatctgggccaagattcctcacacggacggcaacttccacccgtctccgctgatgggcggctttggcctgaaacatcctccgcctcagatcctgatcaagaacacgcctgtacctgcggatcctccgaccaccttcaaccagtcaaagctgaactctttcatcacgcaatacagcaccggacaggtcagcgtggaaattgaatgggagctgcagaaggaaaacagcaagcgctggaaccccgagatccagtacacctccaactactacaaatctacaagtgtggactttgctgttaatacagaaggcgtgtactctgaaccccgccccattggcacccgttacctcacccgtaatctgtaattgcctgttaatcaataaaccggttgattcgtttcagttgaactttggtctctgcgaagggcgaattcgtttaaacctgcaggactagaggtcctgtattagaggtcacgtgagtgttttgcgacattttgcgacaccatgtggtcacgctgggtatttaagcccgagtgagcacgcagggtctccattttgaagcgggaggtttgaacgcgcagccgccaagccgaattctgcatcgcgatagggataacagggtaataaataatgtactagagacactttcaataaaggcaaatgcttttatttgtacactctcgggtgattatttacccccacccttgccgtctgcgccgtttaaaaatcaaaggggttctgccgcgcatcgctatgcgccactggcagggacacgttgcgatactggtgtttagtgctccacttaaactcaggcacaaccatccgcggcagctcggtgaagttttcactccacaggctgcgcaccatcaccaacgcgtttagcaggtcgggcgccgatatcttgaagtcgcagttggggcctccgccctgcgcgcgcgagttgcgatacacagggttgcagcactggaacactatcagcgccgggtggtgcacgctggccagcacgctcttgtcggagatcagatccgcgtccaggtcctccgcgttgctcagggcgaacggagtcaactttggtagctgccttcccaaaaagggcgcgtgcccaggctttgagttgcactcgcaccgtagtggcatcaaaaggtgaccgtgcccggtctgggcgttaggatacagcgcctgcataaaagccttgatctgcttaaaagccacctgagcctttgcgccttcagagaagaacatgccgcaagacttgccggaaaactgattggccggacaggccgcgtcgtgcacgcagcaccttgcgtcggtgttggagatctgcaccacatttcggccccaccggttcttcacgatcttggccttgctagactgctccttcagcgcgcgctgcccgttttcgctcgtcacatccatttcaatcacgtgctccttatttatcataatgcttccgtgtagacacttaagctcgccttcgatctcagcgcagcggtgcagccacaacgcgcagcccgtgggctcgtgatgcttgtaggtcacctctgcaaacgactgcaggtacgcctgcaggaatcgccccatcatcgtcacaaaggtcttgttgctggtgaaggtcagctgcaacccgcggtgctcctcgttcagccaggtcttgcatacggccgccagagcttccacttggtcaggcagtagtttgaagttcgcctttagatcgttatccacgtggtacttgtccatcagcgcgcgcgcagcctccatgcccttctcccacgcagacacgatcggcacactcagcgggttcatcaccgtaatttcactttccgcttcgctgggctcttcctcttcctcttgcgtccgcataccacgcgccactgggtcgtcttcattcagccgccgcactgtgcgcttacctcctttgccatgcttgattagcaccggtgggttgctgaaacccaccatttgtagcgccacatcttctctttcttcctcgctgtccacgattacctctggtgatggcgggcgctcgggcttgggagaagggcgcttctttttcttcttgggcgcaatggccaaatccgccgccgaggtcgatggccgcgggctgggtgtgcgcggcaccagcgcgtcttgtgatgagtcttcctcgtcctcggactcgatacgccgcctcatccgcttttttgggggcgcccggggaggcggcggcgacggggacggggacgacacgtcctccatggttgggggacgtcgcgccgcaccgcgtccgcgctcgggggtggtttcgcgctgctcctcttcccgactggccatttccttctcctataggcagaaaaagatcatggagtcagtcgagaagaaggacagcctaaccgccccctctgagttcgccaccaccgcctccaccgatgccgccaacgcgcctaccaccttccccgtcgaggcacccccgcttgaggaggaggaagtgattatcgagcaggacccaggttttgtaagcgaagacgacgaggaccgctcagtaccaacagaggataaaaagcaagaccaggacaacgcagaggcaaacgaggaacaagtcgggcggggggacgaaaggcatggcgactacctagatgtgggagacgacgtgctgttgaagcatctgcagcgccagtgcgccattatctgcgacgcgttgcaagagcgcagcgatgtgcccctcgccatagcggatgtcagccttgcctacgaacgccacctattctcaccgcgcgtaccccccaaacgccaagaaaacggcacatgcgagcccaacccgcgcctcaacttctaccccgtatttgccgtgccagaggtgcttgccacctatcacatctttttccaaaactgcaagatacccctatcctgccgtgccaaccgcagccgagcggacaagcagctggccttgcggcagggcgctgtcatacctgatatcgcctcgctcaacgaagtgccaaaaatctttgagggtcttggacgcgacgagaagcgcgcggcaaacgctctgcaacaggaaaacagcgaaaatgaaagtcactctggagtgttggtggaactcgagggtgacaacgcgcgcctagccgtactaaaacgcagcatcgaggtcacccactttgcctacccggcacttaacctaccccccaaggtcatgagcacagtcatgagtgagctgatcgtgcgccgtgcgcagcccctggagagggatgcaaatttgcaagaacaaacagaggagggcctacccgcagttggcgacgagcagctagcgcgctggcttcaaacgcgcgagcctgccgacttggaggagcgacgcaaactaatgatggccgcagtgctcgttaccgtggagcttgagtgcatgcagcggttctttgctgacccggagatgcagcgcaagctagaggaaacattgcactacacctttcgacagggctacgtacgccaggcctgcaagatctccaacgtggagctctgcaacctggtctcctaccttggaattttgcacgaaaaccgccttgggcaaaacgtgcttcattccacgctcaagggcgaggcgcgccgcgactacgtccgcgactgcgtttacttatttctatgctacacctggcagacggccatgggcgtttggcagcagtgcttggaggagtgcaacctcaaggagctgcagaaactgctaaagcaaaacttgaaggacctatggacggccttcaacgagcgctccgtggccgcgcacctggcggacatcattttccccgaacgcctgcttaaaaccctgcaacagggtctgccagacttcaccagtcaaagcatgttgcagaactttaggaactttatcctagagcgctcaggaatcttgcccgccacctgctgtgcacttcctagcgactttgtgcccattaagtaccgcgaatgccctccgccgctttggggccactgctaccttctgcagctagccaactaccttgcctaccactctgacataatggaagacgtgagcggtgacggtctactggagtgtcactgtcgctgcaacctatgcaccccgcaccgctccctggtttgcaattcgcagctgcttaacgaaagtcaaattatcggtacctttgagctgcagggtccctcgcctgacgaaaagtccgcggctccggggttgaaactcactccggggctgtggacgtcggcttaccttcgcaaatttgtacctgaggactaccacgcccacgagattaggttctacgaagaccaatcccgcccgcctaatgcggagcttaccgcctgcgtcattacccagggccacattcttggccaattgcaagccatcaacaaagcccgccaagagtttctgctacgaaagggacggggggtttacttggacccccagtccggcgaggagctcaacccaatccccccgccgccgcagccctatcagcagcagccgcgggcccttgcttcccaggatggcacccaaaaagaagctgcagctgccgccgccacccacggacgaggaggaatactgggacagtcaggcagaggaggttttggacgaggaggaggaggacatgatggaagactgggagagcctagacgaggaagcttccgaggtcgaagaggtgtcagacgaaacaccgtcaccctcggtcgcattcccctcgccggcgccccagaaatcggcaaccggttccagcatggctacaacctccgctcctcaggcgccgccggcactgcccgttcgccgacccaaccgtagatgggacaccactggaaccagggccggtaagtccaagcagccgccgccgttagcccaagagcaacaacagcgccaaggctaccgctcatggcgcgggcacaagaacgccatagttgcttgcttgcaagactgtgggggcaacatctccttcgcccgccgctttcttctctaccatcacggcgtggccttcccccgtaacatcctgcattactaccgtcatctctacagcccatactgcaccggcggcagcggcagcaacagcagcggccacacagaagcaaaggcgaccggatagcaagactctgacaaagcccaagaaatccacagcggcggcagcagcaggaggaggagcgctgcgtctggcgcccaacgaacccgtatcgacccgcgagcttagaaacaggatttttcccactctgtatgctatatttcaacagagcaggggccaagaacaagagctgaaaataaaaaacaggtctctgcgatccctcacccgcagctgcctgtatcacaaaagcgaagatcagcttcggcgcacgctggaagacgcggaggctctcttcagtaaatactgcgcgctgactcttaaggactagtttcgcgccctttctcaaatttaagcgcgaaaactacgtcatctccagcggccacacccggcgccagcacctgttgtcagcgccattttttagggcggagtaacttgtatgtgttgggaattgtagttttcttaaaatgggaagtgacgtaacgtgggaaaacggaagtgacgatttgaggaagttgtgggttttttggctttcgtttctgggcgtaggttcgcgtgcggttttctgggtgttttttgtggactttaaccgttacgtcattttttagtcctatatatactcgctctgcacttggcccttttttacactgtgactgattgagctggtgccgtgtcgagtggtgtttttttaataggttttcttttttactggtaaggctgactgttatgactacgtccggcgttccatttggcatgacactacgaccaacacgatctcggttgtctcggcgcactccgtacagtagggatcgtctacctccttttgagacagaaacccgcgctaccatactggaggatcatccgctgctgcccgaatgtaacactttgacaatgcacaacgtgagttacgtgcgaggtcttccctgcagtgtgggatttacgctgattcaggaatgggttgttccctgggatatggttctaacgcgggaggagcttgtaatcctgaggaagtgtatgcacgtgtgcctgtgttgtgccaacattgatatcatgacgagcatgatgatccatggttacgagtcctgggctctccactgtcattgttccagtcccggttccctgcagtgtatagccggcgggcaggttttggccagctggtttaggatggtggtggatggcgccatgtttaatcagaggtttatatggtaccgggaggtggtgaattacaacatgccaaaagaggtaatgtttatgtccagcgtgtttatgaggggtcgccacttaatctacctgcgcttgtggtatgatggccacgtgggttctgtggtccccgccatgagctttggatacagcgccttgcactgtgggattttgaacaatattgtggtgctgtgctgcagttactgtgctgatttaagtgagatcagggtgcgctgctgtgcccggaggacaaggcgccttatgctgcgggcggtgcgaatcatcgctgaggagaccactgccatgttgtattcctgcaggacggagcggcggcggcagcagtttattcgcgcgctgctgcagcaccaccgccctatcctgatgcacgattatgactctacccccatgtaggcgtggacttctccttcgccgcccgttaagcaaccgcaagttggacagcagcctgtggctcagcagctggacagcgacatgaacttaagtgagctgcccggggagtttattaatatcactgatgagcgtttggctcgacaggaaaccgtgtggaatataacacctaagaatatgtctgttacccatgatatgatgctttttaaggccagccggggagaaaggactgtgtactctgtgtgttgggagggaggtggcaggttgaatactagggttctgtgagtttgattaaggtacggtgatctgtataagctatgtggtggtggggctatactactgaatgaaaaatgacttgaaattttctgcaattgaaaaataaacacgttgaaacataacacaaacgattctttattcttgggcaatgtatgaaaaagtgtaagaggatgtggcaaatatttcattaatgtagttgtggccagaccagtcccatgaaaatgacatagagtatgcacttggagttgtgtctcctgtttcctgtgtaccgtttagtgtaatggttagtgttacaggtttagttttgtctccgtttaagtaaacttgactgacaatgttacttttggcagttttaccgtgagattttggataagctgataggttaggcataaatccaacagcgtttgtataggctgtcgcccctcctgacgcggtaggaggaggggagggtgccctgcatgtctgccgctgctcttgctcttgccgctgctgaggaggggggcgcatctgccgcagcaccggatgcatctgggaaaagcaaaaaaggggctcgtccctgtttccggaggaatttgcaagcggggtcttgcatgacggggaggcaaacccccgttcgccgcagtccggccggtccgagactcgaaccgggggtcccgcgactcaacccttggaaaataaccctccggctacagggagcgagccacttaatgctttcgctttccagcctaaccgcttacgctgcgcgcggccagtggccaaaaaagctagcgcagcagccgccgcgcctggaaggaagccaaaaggagcactcccccgttgtctgacgtcgcacacctgggttcgacacgcgggcggtaaccgcatggatcacggcggacggccggatacggggctcgaaccccggtcgtccgccatgatacccttgcgaatttatccaccagaccacggaagagtgcccgcttacaggctctccttttgcacggtctagagcgtcaacgattgcgcgcgcctgaccggccagagcgtcccgaccatggagcactttttgccgctgcgcaacatctggaaccgcgtccgcgactttccgcgcgcctccaccaccgccgccggcatcacctggatgtccaggtacatctacggatatggcaaacagctattatgggtattatgggtgcggccgcggatcccgggcccgtcgactgcagaggcctgcatgcaagcttggtgtaatcatggtcatagctgtttcctgtgtgaaattgttatccgctcacaattccacacaacatacgagccggaagcataaagtgtaaagcctggggtgcctaatgagtgagctaactcacattaattgcgttgcgctcactgcccgctttccagtcgggaaacctgtcgtgccagctgcattaatgaatcggccaacgcgcggggagaggcggtttgcgtattgggcgctcttccgcttcctcgctcactgactcgctgcgctcggtcgttcggctgcggcgagcggtatcagctcactcaaaggcggtaatacggttatccacagaatcaggggataacgcaggaaagaacatgtgagcaaaaggccagcaaaaggccaggaaccgtaaaaaggccgcgttgctggcgtttttccataggctccgcccccctgacgagcatcacaaaaatcgacgctcaagtcagaggtggcgaaacccgacaggactataaagataccaggcgtttccccctggaagctccctcgtgcgctctcctgttccgaccctgccgcttaccggatacctgtccgcctttctcccttcgggaagcgtggcgctttctcatagctcacgctgtaggtatctcagttcggtgtaggtcgttcgctccaagctgggctgtgtgcacgaaccccccgttcagcccgaccgctgcgccttatccggtaactatcgtcttgagtccaacccggtaagacacgacttatcgccactggcagcagccactggtaacaggattagcagagcgaggtatgtaggcggtgctacagagttcttgaagtggtggcctaactacggctacactagaagaacagtatttggtatctgcgctctgctgaagccagttaccttcggaaaaagagttggtagctcttgatccggcaaacaaaccaccgctggtagcggtggtttttttgtttgcaagcagcagattacgcgcagaaaaaaaggatctcaagaagatcctttgatcttttctacggggtctgacgctcagtggaacgaaaactcacgttaagggattttggtcatgagattatcaaaaaggatcttcacctagatccttttaaattaaaaatgaagttttaaatcaagcccaatctgaataatgttacaaccaattaaccaattctgattagaaaaactcatcgagcatcaaatgaaactgcaatttattcatatcaggattatcaataccatatttttgaaaaagccgtttctgtaatgaaggagaaaactcaccgaggcagttccataggatggcaagatcctggtatcggtctgcgattccgactcgtccaacatcaatacaacctattaatttcccctcgtcaaaaataaggttatcaagtgagaaatcaccatgagtgacgactgaatccggtgagaatggcaaaagtttatgcatttctttccagacttgttcaacaggccagccattacgctcgtcatcaaaatcactcgcatcaaccaaaccgttattcattcgtgattgcgcctgagcgagacgaaatacgcgatcgctgttaaaaggacaattacaaacaggaatcgaatgcaaccggcgcaggaacactgccagcgcatcaacaatattttcacctgaatcaggatattcttctaatacctggaatgctgtttttccggggatcgcagtggtgagtaaccatgcatcatcaggagtacggataaaatgcttgatggtcggaagaggcataaattccgtcagccagtttagtctgaccatctcatctgtaacatcattggcaacgctacctttgccatgtttcagaaacaactctggcgcatcgggcttcccatacaagcgatagattgtcgcacctgattgcccgacattatcgcgagcccatttatacccatataaatcagcatccatgttggaatttaatcgcggcctcgacgtttcccgttgaatatggctcataacaccccttgtattactgtttatgtaagcagacagttttattgttcatgatgatatatttttatcttgtgcaatgtaacatcagagattttgagacacgggccagagctgca

SEQ ID NO: 88 - DNA, 12588 bp, synthetic construct
  source 1..12588: mol_type = other DNA
tcgcgcgtttcggtgatgacggtgaaaacctctgacacatgcagctcccggagacggtcacagcttgtctgtaagcggatgccgggagcagacaagcccgtcagggcgcgtcagcgggtgttggcgggtgtcggggctggcttaactatgcggcatcagagcagattgtactgagagtgcaccatatgcggtgtgaaataccgcacagatgcgtaaggagaaaataccgcatcaggcgccattcgccattcaggctgcgcaactgttgggaagggcgatcggtgcgggcctcttcgctattacgccagctggcgaaagggggatgtgctgcaaggcgattaagttgggtaacgccagggttttcccagtcacgacgttgtaaaacgacggccagagaattccgcagggtctccattttgaagcgggaggtttgaacgcgcagccgccatgccggggttttacgagattgtgattaaggtccccagcgaccttgacgagcatctgcccggcatttctgacagctttgtgaactgggtggccgagaaggaatgggagttgccgccagattctgacatggatctgaatctgattgagcaggcacccctgaccgtggccgagaagctgcagcgcgactttctgacggaatggcgccgtgtgagtaaggccccggaggctcttttctttgtgcaatttgagaagggagagagctacttccacatgcacgtgctcgtggaaaccaccggggtgaaatccatggttttgggacgtttcctgagtcagattcgcgaaaaactgattcagagaatttaccgcgggatcgagccgactttgccaaactggttcgcggtcacaaagaccagaaatggcgccggaggcgggaacaaggtggtggatgagtgctacatccccaattacttgctccccaaaacccagcctgagctccagtgggcgtggactaatatggaacagtatttaagcgcctgtttgaatctcacggagcgtaaacggttggtggcgcagcatctgacgcacgtgtcgcagacgcaggagcagaacaaagagaatcagaatcccaattctgatgcgccggtgatcagatcaaaaacttcagccaggtacatggagctggtcgggtggctcgtggacaaggggattacctcggagaagcagtggatccaggaggaccaggcctcatacatctccttcaatgcggcctccaactcgcggtcccaaatcaaggctgccttggacaatgcgggaaagattatgagcctgactaaaaccgcccccgactacctggtgggccagcagcccgtggaggacatttccagcaatcggatttataaaattttggaactaaacgggtacgatccccaatatgcggcttccgtctttctgggatgggccacgaaaaagttcggcaagaggaacaccatctggctgtttgggcctgcaactaccgggaagaccaacatcgcggaggccatagcccacactgtgcccttctacgggtgcgtaaactggaccaatgagaactttcccttcaacgactgtgtcgacaagatggtgatctggtgggaggaggggaagatgaccgccaaggtcgtggagtcggccaaagccattctcggaggaagcaaggtgcgcgtggaccagaaatgcaagtcctcggcccagatagacccgactcccgtgatcgtcacctccaacaccaacatgtgcgccgtgattgacgggaactcaacgaccttcgaacaccagcagccgttgcaagaccggatgttcaaatttgaactcacccgccgtctggatcatgactttgggaaggtcaccaagcaggaagtcaaagactttttccggtgggcaaaggatcacgtggttgaggtggagcatgaattctacgtcaaaaagggtggagccaagaaaagacccgcccccagtgacgcagatataagtgagcccaaacgggtgcgcgagtcagttgcgcagccatcgacgtcagacgcggaagcttcgatcaactacgcagacaggtaccaaaacaaatgttctcgtcacgtgggcatgaatctgatgctgtttccctgcagacaatgcgagagaatgaatcagaattcaaatatctgcttcactcacggacagaaagactgtttagagtgctttcccgtgtcagaatctcaacccgtttctgtcgtcaaaaaggcgtatcagaaactgtgctacattcatcatatcatgggaaaggtgccagacgcttgcactgcctgcgatctggtcaatgtggatttggatgactgcatctttgaacaataaatgatttaaatcaggtatggctgccgatggttatcttccagattggctcgaggacaacctctctgagggcattcgcgagtggtgggcgctgaaacctggagccccgaagcccaaagccaaccagcaaaagcaggacgacggccggggtctggtgcttcctggctacaagtacctcggacccttcaacggactcgacaagggggagcccgtcaacgcggcggacgcagcggccctcgagcacgacaaggcctacgaccagcagctgcaggcgggtgacaatccgtacctgcggtataaccacgccgacgccgagtttcaggagcgtctgcaagaagatacgtcttttgggggcaacctcgggcgagcagtcttccaggccaagaagcgggttctcgaacctctcggtctggttgaggaaggcgctaagacggctcctggaaagaagagaccggtagagccatcaccccagcgttctccagactcctctacgggcatcggcaagaaaggccaacagcccgccagaaaaagactcaattttggtcagactggcgactcagagtcagttccagaccctcaacctctcggagaacctccagcagcgccctctggtgtgggacctaatacaatggctgcaggcggtggcgcaccaatggcagacaataacgaaggcgccgacggagtgggtagttcctcgggaaattggcattgcgattccacatggctgggcgacagagtcatcaccaccagcacccgaacctgggccctgcccacctacaacaaccacctctacaagcaaatctccaacgggacatcgggaggagccaccaacgacaacacctacttcggctacagcaccccctgggggtattttgactttaacagattccactgccacttttcaccacgtgactggcagcgactcatcaacaacaactggggattccggcccaagagactcagcttcaagctcttcaacatccaggtcaaggaggtcacgcagaatgaaggcaccaagaccatcgccaataacctcaccagcaccatccaggtgtttacggactcggagtaccagctgccgtacgttctcggctctgcccaccagggctgcctgcctccgttcccggcggacgtgttcatgattccccagtacggctacctaacactcaacaacggtagtcaggccgtgggacgctcctccttctactgcctggaatactttccttcgcagatgctgagaaccggcaacaacttccagtttacttacaccttcgaggacgtgcctttccacagcagctacgcccacagccagagcttggaccggctgatgaatcctctgattgaccagtacctgtactacttgtctcggactcaaacaacaggaggcacggcaaatacgcagactctgggcttcagccaaggtgggcctaatacaatggccaatcaggcaaagaactggctgccaggaccctgttaccgccaacaacgcgtctcaacgacaaccgggcaaaacaacaatagcaactttgcctggactgctgggaccaaataccatctgaatggaagaaattcattggctaatcctggcatcgctatggcaacacacaaagacgacgaggagcgtttttttcccagtaacgggatcctgatttttggcaaacaaaatgctgccagagacaatgcggattacagcgatgtcatgctcaccagcgaggaagaaatcaaaaccactaaccctgtggctacagaggaatacggtatcgtggcagataacttgcagcagcaaaacacggctcctcaaattggaactgtcaacagccagggggccttacccggtatggtctggcagaaccgggacgtgtacctgcagggtcccatctgggccaagattcctcacacggacggcaacttccacccgtctccgctgatgggcggctttggcctgaaacatcctccgcctcagatcctgatcaagaacacgcctgtacctgcggatcctccgaccaccttcaaccagtcaaagctgaactctttcatcacgcaatacagcaccggacaggtcagcgtggaaattgaatgggagctgcagaaggaaaacagcaagcgctggaaccccgagatccagtacacctccaactactacaaatctacaagtgtggactttgctgttaatacagaaggcgtgtactctgaaccccgccccattggcacccgttacctcacccgtaatctgtaattgcctgttaatcaataaaccggttgattcgtttcagttgaactttggtctctgcgaagggcgaattcgtttaaacctgcaggactagaggtcctgtattagaggtcacgtgagtgttttgcgacattttgcgacaccatgtggtcacgctgggtatttaagcccgagtgagcacgcagggtctccattttgaagcgggaggtttgaacgcgcagccgccaagccgaattctgcatcgcgatagggataacagggtaataaataatgtactagagacactttcaataaaggcaaatgcttttatttgtacactctcgggtgattatttacccccacccttgccgtctgcgccgtttaaaaatcaaaggggttctgccgcgcatcgctatgcgccactggcagggacacgttgcgatactggtgtttagtgctccacttaaactcaggcacaaccatccgcggcagctcggtgaagttttcactccacaggctgcgcaccatcaccaacgcgtttagcaggtcgggcgccgatatcttgaagtcgcagttggggcctccgccctgcgcgcgcgagttgcgatacacagggttgcagcactggaacactatcagcgccgggtggtgcacgctggccagcacgctcttgtcggagatcagatccgcgtccaggtcctccgcgttgctcagggcgaacggagtcaactttggtagctgccttcccaaaaagggcgcgtgcccaggctttgagttgcactcgcaccgtagtggcatcaaaaggtgaccgtgcccggtctgggcgttaggatacagcgcctgcataaaagccttgatctgcttaaaagccacctgagcctttgcgccttcagagaagaacatgccgcaagacttgccggaaaactgattggccggacaggccgcgtcgtgcacgcagcaccttgcgtcggtgttggagatctgcaccacatttcggccccaccggttcttcacgatcttggccttgctagactgctccttcagcgcgcgctgcccgttttcgctcgtcacatccatttcaatcacgtgctccttatttatcataatgcttccgtgtagacacttaagctcgccttcgatctcagcgcagcggtgcagccacaacgcgcagcccgtgggctcgtgatgcttgtaggtcacctctgcaaacgactgcaggtacgcctgcaggaatcgccccatcatcgtcacaaaggtcttgttgctggtgaaggtcagctgcaacccgcggtgctcctcgttcagccaggtcttgcatacggccgccagagcttccacttggtcaggcagtagtttgaagttcgcctttagatcgttatccacgtggtacttgtccatcagcgcgcgcgcagcctccatgcccttctcccacgcagacacgatcggcacactcagcgggttcatcaccgtaatttcactttccgcttcgctgggctcttcctcttcctcttgcgtccgcataccacgcgccactgggtcgtcttcattcagccgccgcactgtgcgcttacctcctttgccatgcttgattagcaccggtgggttgctgaaacccaccatttgtagcgccacatcttctctttcttcctcgctgtccacgattacctctggtgatggcgggcgctcgggcttgggagaagggcgcttctttttcttcttgggcgcaatggccaaatccgccgccgaggtcgatggccgcgggctgggtgtgcgcggcaccagcgcgtcttgtgatgagtcttcctcgtcctcggactcgatacgccgcctcatccgcttttttgggggcgcccggggaggcggcggcgacggggacggggacgacacgtcctccatggttgggggacgtcgcgccgcaccgcgtccgcgctcgggggtggtttcgcgctgctcctcttcccgactggccatttccttctcctataggcagaaaaagatcgttgaaactcactccggggctgtggacgtcggcttaccttcgcaaatttgtacctgaggactaccacgcccacgagattaggttctacgaagaccaatcccgcccgcctaatgcggagcttaccgcctgcgtcattacccagggccacattcttggccaattgcaagccatcaacaaagcccgccaagagtttctgctacgaaagggacggggggtttacttggacccccagtccggcgaggagctcaacccaatccccccgccgccgcagccctatcagcagcagccgcgggcccttgcttcccaggatggcacccaaaaagaagctgcagctgccgccgccacccacggacgaggaggaatactgggacagtcaggcagaggaggttttggacgaggaggaggaggacatgatggaagactgggagagcctagacgaggaagcttccgaggtcgaagaggtgtcagacgaaacaccgtcaccctcggtcgcattcccctcgccggcgccccagaaatcggcaaccggttccagcatggctacaacctccgctcctcaggcgccgccggcactgcccgttcgccgacccaaccgtagatgggacaccactggaaccagggccggtaagtccaagcagccgccgccgttagcccaagagcaacaacagcgccaaggctaccgctcatggcgcgggcacaagaacgccatagttgcttgcttgcaagactgtgggggcaacatctccttcgcccgccgctttcttctctaccatcacggcgtggccttcccccgtaacatcctgcattactaccgtcatctctacagcccatactgcaccggcggcagcggcagcaacagcagcggccacacagaagcaaaggcgaccggatagcaagactctgacaaagcccaagaaatccacagcggcggcagcagcaggaggaggagcgctgcgtctggcgcccaacgaacccgtatcgacccgcgagcttagaaacaggatttttcccactctgtatgctatatttcaacagagcaggggccaagaacaagagctgaaaataaaaaacaggtctctgcgatccctcacccgcagctgcctgtatcacaaaagcgaagatcagcttcggcgcacgctggaagacgcggaggctctcttcagtaaatactgcgcgctgactcttaaggactagtttcgcgccctttctcaaatttaagcgcgaaaactacgtcatctccagcggccacacccggcgccagcacctgttgtcagcgccattttttagggcggagtaacttgtatgtgttgggaattgtagttttcttaaaatgggaagtgacgtaacgtgggaaaacggaagtgacgatttgaggaagttgtgggttttttggctttcgtttctgggcgtaggttcgcgtgcggttttctgggtgttttttgtggactttaaccgttacgtcattttttagtcctatatatactcgctctgcacttggcccttttttacactgtgactgattgagctggtgccgtgtcgagtggtgtttttttaataggttttcttttttactggtaaggctgactgttatgactacgtccggcgttccatttggcatgacactacgaccaacacgatctcggttgtctcggcgcactccgtacagtagggatcgtctacctccttttgagacagaaacccgcgctaccatactggaggatcatccgctgctgcccgaatgtaacactttgacaatgcacaacgtgagttacgtgcgaggtcttccctgcagtgtgggatttacgctgattcaggaatgggttgttccctgggatatggttctaacgcgggaggagcttgtaatcctgaggaagtgtatgcacgtgtgcctgtgttgtgccaacattgatatcatgacgagcatgatgatccatggttacgagtcctgggctctccactgtcattgttccagtcccggttccctgcagtgtatagccggcgggcaggttttggccagctggtttaggatggtggtggatggcgccatgtttaatcagaggtttatatggtaccgggaggtggtgaattacaacatgccaaaagaggtaatgtttatgtccagcgtgtttatgaggggtcgccacttaatctacctgcgcttgtggtatgatggccacgtgggttctgtggtccccgccatgagctttggatacagcgccttgcactgtgggattttgaacaatattgtggtgctgtgctgcagttactgtgctgatttaagtgagatcagggtgcgctgctgtgcccggaggacaaggcgccttatgctgcgggcggtgcgaatcatcgctgaggagaccactgccatgttgtattcctgcaggacggagcggcggcggcagcagtttattcgcgcgctgctgcagcaccaccgccctatcctgatgcacgattatgactctacccccatgtaggcgtggacttctccttcgccgcccgttaagcaaccgcaagttggacagcagcctgtggctcagcagctggacagcgacatgaacttaagtgagctgcccggggagtttattaatatcactgatgagcgtttggctcgacaggaaaccgtgtggaatataacacctaagaatatgtctgttacccatgatatgatgctttttaaggccagccggggagaaaggactgtgtactctgtgtgttgggagggaggtggcaggttgaatactagggttctgtgagtttgattaaggtacggtgatctgtataagctatgtggtggtggggctatactactgaatgaaaaatgacttgaaattttctgcaattgaaaaataaacacgttgaaacataacacaaacgattctttattcttgggcaatgtatgaaaaagtgtaagaggatgtggcaaatatttcattaatgtagttgtggccagaccagtcccatgaaaatgacatagagtatgcacttggagttgtgtctcctgtttcctgtgtaccgtttagtgtaatggttagtgttacaggtttagttttgtctccgtttaagtaaacttgactgacaatgttacttttggcagttttaccgtgagattttggataagctgataggttaggcataaatccaacagcgtttgtataggctgtcgcccctcctgacgcggtaggaggaggggagggtgccctgcatgtctgccgctgctcttgctcttgccgctgctgaggaggggggcgcatctgccgcagcaccggatgcatctgggaaaagcaaaaaaggggctcgtccctgtttccggaggaatttgcaagcggggtcttgcatgacggggaggcaaacccccgttcgccgcagtccggccggtccgagactcgaaccgggggtcccgcgactcaacccttggaaaataaccctccggctacagggagcgagccacttaatgctttcgctttccagcctaaccgcttacgctgcgcgcggccagtggccaaaaaagctagcgcagcagccgccgcgcctggaaggaagccaaaaggagcactcccccgttgtctgacgtcgcacacctgggttcgacacgcgggcggtaaccgcatggatcacggcggacggccggatacggggctcgaaccccggtcgtccgccatgatacccttgcgaatttatccaccagaccacggaagagtgcccgcttacaggctctccttttgcacggtctagagcgtcaacgattgcgcgcgcctgaccggccagagcgtcccgaccatggagcactttttgccgctgcgcaacatctggaaccgcgtccgcgactttccgcgcgcctccaccaccgccgccggcatcacctggatgtccaggtacatctacggatatggcaaacagctattatgggtattatgggtgcggccgcggatcccgggcccgtcgactgcagaggcctgcatgcaagcttggtgtaatcatggtcatagctgtttcctgtgtgaaattgttatccgctcacaattccacacaacatacgagccggaagcataaagtgtaaagcctggggtgcctaatgagtgagctaactcacattaattgcgttgcgctcactgcccgctttccagtcgggaaacctgtcgtgccagctgcattaatgaatcggccaacgcgcggggagaggcggtttgcgtattgggcgctcttccgcttcctcgctcactgactcgctgcgctcggtcgttcggctgcggcgagcggtatcagctcactcaaaggcggtaatacggttatccacagaatcaggggataacgcaggaaagaacatgtgagcaaaaggccagcaaaaggccaggaaccgtaaaaaggccgcgttgctggcgtttttccataggctccgcccccctgacgagcatcacaaaaatcgacgctcaagtcagaggtggcgaaacccgacaggactataaagataccaggcgtttccccctggaagctccctcgtgcgctctcctgttccgaccctgccgcttaccggatacctgtccgcctttctcccttcgggaagcgtggcgctttctcatagctcacgctgtaggtatctcagttcggtgtaggtcgttcgctccaagctgggctgtgtgcacgaaccccccgttcagcccgaccgctgcgccttatccggtaactatcgtcttgagtccaacccggtaagacacgacttatcgccactggcagcagccactggtaacaggattagcagagcgaggtatgtaggcggtgctacagagttcttgaagtggtggcctaactacggctacactagaagaacagtatttggtatctgcgctctgctgaagccagttaccttcggaaaaagagttggtagctcttgatccggcaaacaaaccaccgctggtagcggtggtttttttgtttgcaagcagcagattacgcgcagaaaaaaaggatctcaagaagatcctttgatcttttctacggggtctgacgctcagtggaacgaaaactcacgttaagggattttggtcatgagattatcaaaaaggatcttcacctagatccttttaaattaaaaatgaagttttaaatcaagcccaatctgaataatgttacaaccaattaaccaattctgattagaaaaactcatcgagcatcaaatgaaactgcaatttattcatatcaggattatcaataccatatttttgaaaaagccgtttctgtaatgaaggagaaaactcaccgaggcagttccataggatggcaagatcctggtatcggtctgcgattccgactcgtccaacatcaatacaacctattaatttcccctcgtcaaaaataaggttatcaagtgagaaatcaccatgagtgacgactgaatccggtgagaatggcaaaagtttatgcatttctttccagacttgttcaacaggccagccattacgctcgtcatcaaaatcactcgcatcaaccaaaccgttattcattcgtgattgcgcctgagcgagacgaaatacgcgatcgctgttaaaaggacaattacaaacaggaatcgaatgcaaccggcgcaggaacactgccagcgcatcaacaatattttcacctgaatcaggatattcttctaatacctggaatgctgtttttccggggatcgcagtggtgagtaaccatgcatcatcaggagtacggataaaatgcttgatggtcggaagaggcataaattccgtcagccagtttagtctgaccatctcatctgtaacatcattggcaacgctacctttgccatgtttcagaaacaactctggcgcatcgggcttcccatacaagcgatagattgtcgcacctgattgcccgacattatcgcgagcccatttatacccatataaatcagcatccatgttggaatttaatcgcggcctcgacgtttcccgttgaatatggctcataacaccccttgtattactgtttatgtaagcagacagttttattgttcatgatgatatatttttatcttgtgcaatgtaacatcagagattttgagacacgggccagagctgca

SEQ ID NO: 89 - DNA, 12588 bp, synthetic construct
  source 1..12588: mol_type = other DNA
tcgcgcgtttcggtgatgacggtgaaaacctctgacacatgcagctcccggagacggtcacagcttgtctgtaagcggatgccgggagcagacaagcccgtcagggcgcgtcagcgggtgttggcgggtgtcggggctggcttaactatgcggcatcagagcagattgtactgagagtgcaccatatgcggtgtgaaataccgcacagatgcgtaaggagaaaataccgcatcaggcgccattcgccattcaggctgcgcaactgttgggaagggcgatcggtgcgggcctcttcgctattacgccagctggcgaaagggggatgtgctgcaaggcgattaagttgggtaacgccagggttttcccagtcacgacgttgtaaaacgacggccagagaattccgcagggtctccattttgaagcgggaggtttgaacgcgcagccgccatgccggggttttacgagattgtgattaaggtccccagcgaccttgacgagcatctgcccggcatttctgacagctttgtgaactgggtggccgagaaggaatgggagttgccgccagattctgacatggatctgaatctgattgagcaggcacccctgaccgtggccgagaagctgcagcgcgactttctgacggaatggcgccgtgtgagtaaggccccggaggctcttttctttgtgcaatttgagaagggagagagctacttccacatgcacgtgctcgtggaaaccaccggggtgaaatccatggttttgggacgtttcctgagtcagattcgcgaaaaactgattcagagaatttaccgcgggatcgagccgactttgccaaactggttcgcggtcacaaagaccagaaatggcgccggaggcgggaacaaggtggtggatgagtgctacatccccaattacttgctccccaaaacccagcctgagctccagtgggcgtggactaatatggaacagtatttaagcgcctgtttgaatctcacggagcgtaaacggttggtggcgcagcatctgacgcacgtgtcgcagacgcaggagcagaacaaagagaatcagaatcccaattctgatgcgccggtgatcagatcaaaaacttcagccaggtacatggagctggtcgggtggctcgtggacaaggggattacctcggagaagcagtggatccaggaggaccaggcctcatacatctccttcaatgcggcctccaactcgcggtcccaaatcaaggctgccttggacaatgcgggaaagattatgagcctgactaaaaccgcccccgactacctggtgggccagcagcccgtggaggacatttccagcaatcggatttataaaattttggaactaaacgggtacgatccccaatatgcggcttccgtctttctgggatgggccacgaaaaagttcggcaagaggaacaccatctggctgtttgggcctgcaactaccgggaagaccaacatcgcggaggccatagcccacactgtgcccttctacgggtgcgtaaactggaccaatgagaactttcccttcaacgactgtgtcgacaagatggtgatctggtgggaggaggggaagatgaccgccaaggtcgtggagtcggccaaagccattctcggaggaagcaaggtgcgcgtggaccagaaatgcaagtcctcggcccagatagacccgactcccgtgatcgtcacctccaacaccaacatgtgcgccgtgattgacgggaactcaacgaccttcgaacaccagcagccgttgcaagaccggatgttcaaatttgaactcacccgccgtctggatcatgactttgggaaggtcaccaagcaggaagtcaaagactttttccggtgggcaaaggatcacgtggttgaggtggagcatgaattctacgtcaaaaagggtggagccaagaaaagacccgcccccagtgacgcagatataagtgagcccaaacgggtgcgcgagtcagttgcgcagccatcgacgtcagacgcggaagcttcgatcaactacgcagacaggtaccaaaacaaatgttctcgtcacgtgggcatgaatctgatgctgtttccctgcagacaatgcgagagaatgaatcagaattcaaatatctgcttcactcacggacagaaagactgtttagagtgctttcccgtgtcagaatctcaacccgtttctgtcgtcaaaaaggcgtatcagaaactgtgctacattcatcatatcatgggaaaggtgccagacgcttgcactgcctgcgatctggtcaatgtggatttggatgactgcatctttgaacaataaatgatttaaatcaggtatggctgccgatggttatcttccagattggctcgaggacaacctctctgagggcattcgcgagtggtgggcgctgaaacctggagccccgaagcccaaagccaaccagcaaaagcaggacgacggccggggtctggtgcttcctggctacaagtacctcggacccttcaacggactcgacaagggggagcccgtcaacgcggcggacgcagcggccctcgagcacgacaaggcctacgaccagcagctgcaggcgggtgacaatccgtacctgcggtataaccacgccgacgccgagtttcaggagcgtctgcaagaagatacgtcttttgggggcaacctcgggcgagcagtcttccaggccaagaagcgggttctcgaacctctcggtctggttgaggaaggcgctaagacggctcctggaaagaagagaccggtagagccatcaccccagcgttctccagactcctctacgggcatcggcaagaaaggccaacagcccgccagaaaaagactcaattttggtcagactggcgactcagagtcagttccagaccctcaacctctcggagaacctccagcagcgccctctggtgtgggacctaatacaatggctgcaggcggtggcgcaccaatggcagacaataacgaaggcgccgacggagtgggtagttcctcgggaaattggcattgcgattccacatggctgggcgacagagtcatcaccaccagcacccgaacctgggccctgcccacctacaacaaccacctctacaagcaaatctccaacgggacatcgggaggagccaccaacgacaacacctacttcggctacagcaccccctgggggtattttgactttaacagattccactgccacttttcaccacgtgactggcagcgactcatcaacaacaactggggattccggcccaagagactcagcttcaagctcttcaacatccaggtcaaggaggtcacgcagaatgaaggcaccaagaccatcgccaataacctcaccagcaccatccaggtgtttacggactcggagtaccagctgccgtacgttctcggctctgcccaccagggctgcctgcctccgttcccggcggacgtgttcatgattccccagtacggctacctaacactcaacaacggtagtcaggccgtgggacgctcctccttctactgcctggaatactttccttcgcagatgctgagaaccggcaacaacttccagtttacttacaccttcgaggacgtgcctttccacagcagctacgcccacagccagagcttggaccggctgatgaatcctctgattgaccagtacctgtactacttgtctcggactcaaacaacaggaggcacggcaaatacgcagactctgggcttcagccaaggtgggcctaatacaatggccaatcaggcaaagaactggctgccaggaccctgttaccgccaacaacgcgtctcaacgacaaccgggcaaaacaacaatagcaactttgcctggactgctgggaccaaataccatctgaatggaagaaattcattggctaatcctggcatcgctatggcaacacacaaagacgacgaggagcgtttttttcccagtaacgggatcctgatttttggcaaacaaaatgctgccagagacaatgcggattacagcgatgtcatgctcaccagcgaggaagaaatcaaaaccactaaccctgtggctacagaggaatacggtatcgtggcagataacttgcagcagcaaaacacggctcctcaaattggaactgtcaacagccagggggccttacccggtatggtctggcagaaccgggacgtgtacctgcagggtcccatctgggccaagattcctcacacggacggcaacttccacccgtctccgctgatgggcggctttggcctgaaacatcctccgcctcagatcctgatcaagaacacgcctgtacctgcggatcctccgaccaccttcaaccagtcaaagctgaactctttcatcacgcaatacagcaccggacaggtcagcgtggaaattgaatgggagctgcagaaggaaaacagcaagcgctggaaccccgagatccagtacacctccaactactacaaatctacaagtgtggactttgctgttaatacagaaggcgtgtactctgaaccccgccccattggcacccgttacctcacccgtaatctgtaattgcctgttaatcaataaaccggttgattcgtttcagttgaactttggtctctgcgaagggcgaattcgtttaaacctgcaggactagagccgaattctgcatcgcgatagggataacagggtaataaataatgtactagagacactttcaataaaggcaaatgcttttatttgtacactctcgggtgattatttacccccacccttgccgtctgcgccgtttaaaaatcaaaggggttctgccgcgcatcgctatgcgccactggcagggacacgttgcgatactggtgtttagtgctccacttaaactcaggcacaaccatccgcggcagctcggtgaagttttcactccacaggctgcgcaccatcaccaacgcgtttagcaggtcgggcgccgatatcttgaagtcgcagttggggcctccgccctgcgcgcgcgagttgcgatacacagggttgcagcactggaacactatcagcgccgggtggtgcacgctggccagcacgctcttgtcggagatcagatccgcgtccaggtcctccgcgttgctcagggcgaacggagtcaactttggtagctgccttcccaaaaagggcgcgtgcccaggctttgagttgcactcgcaccgtagtggcatcaaaaggtgaccgtgcccggtctgggcgttaggatacagcgcctgcataaaagccttgatctgcttaaaagccacctgagcctttgcgccttcagagaagaacatgccgcaagacttgccggaaaactgattggccggacaggccgcgtcgtgcacgcagcaccttgcgtcggtgttggagatctgcaccacatttcggccccaccggttcttcacgatcttggccttgctagactgctccttcagcgcgcgctgcccgttttcgctcgtcacatccatttcaatcacgtgctccttatttatcataatgcttccgtgtagacacttaagctcgccttcgatctcagcgcagcggtgcagccacaacgcgcagcccgtgggctcgtgatgcttgtaggtcacctctgcaaacgactgcaggtacgcctgcaggaatcgccccatcatcgtcacaaaggtcttgttgctggtgaaggtcagctgcaacccgcggtgctcctcgttcagccaggtcttgcatacggccgccagagcttccacttggtcaggcagtagtttgaagttcgcctttagatcgttatccacgtggtacttgtccatcagcgcgcgcgcagcctccatgcccttctcccacgcagacacgatcggcacactcagcgggttcatcaccgtaatttcactttccgcttcgctgggctcttcctcttcctcttgcgtccgcataccacgcgccactgggtcgtcttcattcagccgccgcactgtgcgcttacctcctttgccatgcttgattagcaccggtgggttgctgaaacccaccatttgtagcgccacatcttctctttcttcctcgctgtccacgattacctctggtgatggcgggcgctcgggcttgggagaagggcgcttctttttcttcttgggcgcaatggccaaatccgccgccgaggtcgatggccgcgggctgggtgtgcgcggcaccagcgcgtcttgtgatgagtcttcctcgtcctcggactcgatacgccgcctcatccgcttttttgggggcgcccggggaggcggcggcgacggggacggggacgacacgtcctccatggttgggggacgtcgcgccgcaccgcgtccgcgctcgggggtggtttcgcgctgctcctcttcccgactggccatttccttctcctataggcagaaaaagatcgttgaaactcactccggggctgtggacgtcggcttaccttcgcaaatttgtacctgaggactaccacgcccacgagattaggttctacgaagaccaatcccgcccgcctaatgcggagcttaccgcctgcgtcattacccagggccacattcttggccaattgcaagccatcaacaaagcccgccaagagtttctgctacgaaagggacggggggtttacttggacccccagtccggcgaggagctcaacccaatccccccgccgccgcagccctatcagcagcagccgcgggcccttgcttcccaggatggcacccaaaaagaagctgcagctgccgccgccacccacggacgaggaggaatactgggacagtcaggcagaggaggttttggacgaggaggaggaggacatgatggaagactgggagagcctagacgaggaagcttccgaggtcgaagaggtgtcagacgaaacaccgtcaccctcggtcgcattcccctcgccggcgccccagaaatcggcaaccggttccagcatggctacaacctccgctcctcaggcgccgccggcactgcccgttcgccgacccaaccgtagatgggacaccactggaaccagggccggtaagtccaagcagccgccgccgttagcccaagagcaacaacagcgccaaggctaccgctcatggcgcgggcacaagaacgccatagttgcttgcttgcaagactgtgggggcaacatctccttcgcccgccgctttcttctctaccatcacggcgtggccttcccccgtaacatcctgcattactaccgtcatctctacagcccatactgcaccggcggcagcggcagcaacagcagcggccacacagaagcaaaggcgaccggatagcaagactctgacaaagcccaagaaatccacagcggcggcagcagcaggaggaggagcgctgcgtctggcgcccaacgaacccgtatcgacccgcgagcttagaaacaggatttttcccactctgtatgctatatttcaacagagcaggggccaagaacaagagctgaaaataaaaaacaggtctctgcgatccctcacccgcagctgcctgtatcacaaaagcgaagatcagcttcggcgcacgctggaagacgcggaggctctcttcagtaaatactgcgcgctgactcttaaggactagtttcgcgccctttctcaaatttaagcgcgaaaactacgtcatctccagcggccacacccggcgccagcacctgttgtcagcgccattttttagggcggagtaacttgtatgtgttgggaattgtagttttcttaaaatgggaagtgacgtaacgtgggaaaacggaagtgacgatttgaggaagttgtgggttttttggctttcgtttctgggcgtaggttcgcgtgcggttttctgggtgttttttgtggactttaaccgttacgtcattttttagtcctatatatactcgctctgcacttggcccttttttacactgtgactgattgagctggtgccgtgtcgagtggtgtttttttaataggttttcttttttactggtaaggctgactgttatgactacgtccggcgttccatttggcatgacactacgaccaacacgatctcggttgtctcggcgcactccgtacagtagggatcgtctacctccttttgagacagaaacccgcgctaccatactggaggatcatccgctgctgcccgaatgtaacactttgacaatgcacaacgtgagttacgtgcgaggtcttccctgcagtgtgggatttacgctgattcaggaatgggttgttccctgggatatggttctaacgcgggaggagcttgtaatcctgaggaagtgtatgcacgtgtgcctgtgttgtgccaacattgatatcatgacgagcatgatgatccatggttacgagtcctgggctctccactgtcattgttccagtcccggttccctgcagtgtatagccggcgggcaggttttggccagctggtttaggatggtggtggatggcgccatgtttaatcagaggtttatatggtaccgggaggtggtgaattacaacatgccaaaagaggtaatgtttatgtccagcgtgtttatgaggggtcgccacttaatctacctgcgcttgtggtatgatggccacgtgggttctgtggtccccgccatgagctttggatacagcgccttgcactgtgggattttgaacaatattgtggtgctgtgctgcagttactgtgctgatttaagtgagatcagggtgcgctgctgtgcccggaggacaaggcgccttatgctgcgggcggtgcgaatcatcgctgaggagaccactgccatgttgtattcctgcaggacggagcggcggcggcagcagtttattcgcgcgctgctgcagcaccaccgccctatcctgatgcacgattatgactctacccccatgtaggcgtggacttctccttcgccgcccgttaagcaaccgcaagttggacagcagcctgtggctcagcagctggacagcgacatgaacttaagtgagctgcccggggagtttattaatatcactgatgagcgtttggctcgacaggaaaccgtgtggaatataacacctaagaatatgtctgttacccatgatatgatgctttttaaggccagccggggagaaaggactgtgtactctgtgtgttgggagggaggtggcaggttgaatactagggttctgtgagtttgattaaggtacggtgatctgtataagctatgtggtggtggggctatactactgaatgaaaaatgacttgaaattttctgcaattgaaaaataaacacgttgaaacataacacaaacgattctttattcttgggcaatgtatgaaaaagtgtaagaggatgtggcaaatatttcattaatgtagttgtggccagaccagtcccatgaaaatgacatagagtatgcacttggagttgtgtctcctgtttcctgtgtaccgtttagtgtaatggttagtgttacaggtttagttttgtctccgtttaagtaaacttgactgacaatgttacttttggcagttttaccgtgagattttggataagctgataggttaggcataaatccaacagcgtttgtataggctgtcgcccctcctgacgcggtaggaggaggggagggtgccctgcatgtctgccgctgctcttgctcttgccgctgctgaggaggggggcgcatctgccgcagcaccggatgcatctgggaaaagcaaaaaaggggctcgtccctgtttccggaggaatttgcaagcggggtcttgcatgacggggaggcaaacccccgttcgccgcagtccggccggtccgagactcgaaccgggggtcccgcgactcaacccttggaaaataaccctccggctacagggagcgagccacttaatgctttcgctttccagcctaaccgcttacgctgcgcgcggccagtggccaaaaaagctagcgcagcagccgccgcgcctggaaggaagccaaaaggagcactcccccgttgtctgacgtcgcacacctgggttcgacacgcgggcggtaaccgcatggatcacggcggacggccggatacggggctcgaaccccggtcgtccgccatgatacccttgcgaatttatccaccagaccacggaagagtgcccgcttacaggctctccttttgcacggtctagagcgtcaacgattgcgcgcgcctgaccggccagagcgtcccgaccatggagcactttttgccgctgcgcaacatctggaaccgcgtccgcgactttccgcgcgcctccaccaccgccgccggcatcacctggatgtccaggtacatctacggatatggcaaacagctattatgggtattatgggtgcggccgcggatcccgggcccgtcgactgcagaggcctgcatgcaagcttggtgtaatcatggtcatagctgtttcctgtgtgaaattgttatccgctcacaattccacacaacatacgagccggaaggtcctgtattagaggtcacgtgagtgttttgcgacattttgcgacaccatgtggtcacgctgggtatttaagcccgagtgagcacgcagggtctccattttgaagcgggaggtttgaacgcgcagccgccaagcataaagtgtaaagcctggggtgcctaatgagtgagctaactcacattaattgcgttgcgctcactgcccgctttccagtcgggaaacctgtcgtgccagctgcattaatgaatcggccaacgcgcggggagaggcggtttgcgtattgggcgctcttccgcttcctcgctcactgactcgctgcgctcggtcgttcggctgcggcgagcggtatcagctcactcaaaggcggtaatacggttatccacagaatcaggggataacgcaggaaagaacatgtgagcaaaaggccagcaaaaggccaggaaccgtaaaaaggccgcgttgctggcgtttttccataggctccgcccccctgacgagcatcacaaaaatcgacgctcaagtcagaggtggcgaaacccgacaggactataaagataccaggcgtttccccctggaagctccctcgtgcgctctcctgttccgaccctgccgcttaccggatacctgtccgcctttctcccttcgggaagcgtggcgctttctcatagctcacgctgtaggtatctcagttcggtgtaggtcgttcgctccaagctgggctgtgtgcacgaaccccccgttcagcccgaccgctgcgccttatccggtaactatcgtcttgagtccaacccggtaagacacgacttatcgccactggcagcagccactggtaacaggattagcagagcgaggtatgtaggcggtgctacagagttcttgaagtggtggcctaactacggctacactagaagaacagtatttggtatctgcgctctgctgaagccagttaccttcggaaaaagagttggtagctcttgatccggcaaacaaaccaccgctggtagcggtggtttttttgtttgcaagcagcagattacgcgcagaaaaaaaggatctcaagaagatcctttgatcttttctacggggtctgacgctcagtggaacgaaaactcacgttaagggattttggtcatgagattatcaaaaaggatcttcacctagatccttttaaattaaaaatgaagttttaaatcaagcccaatctgaataatgttacaaccaattaaccaattctgattagaaaaactcatcgagcatcaaatgaaactgcaatttattcatatcaggattatcaataccatatttttgaaaaagccgtttctgtaatgaaggagaaaactcaccgaggcagttccataggatggcaagatcctggtatcggtctgcgattccgactcgtccaacatcaatacaacctattaatttcccctcgtcaaaaataaggttatcaagtgagaaatcaccatgagtgacgactgaatccggtgagaatggcaaaagtttatgcatttctttccagacttgttcaacaggccagccattacgctcgtcatcaaaatcactcgcatcaaccaaaccgttattcattcgtgattgcgcctgagcgagacgaaatacgcgatcgctgttaaaaggacaattacaaacaggaatcgaatgcaaccggcgcaggaacactgccagcgcatcaacaatattttcacctgaatcaggatattcttctaatacctggaatgctgtttttccggggatcgcagtggtgagtaaccatgcatcatcaggagtacggataaaatgcttgatggtcggaagaggcataaattccgtcagccagtttagtctgaccatctcatctgtaacatcattggcaacgctacctttgccatgtttcagaaacaactctggcgcatcgggcttcccatacaagcgatagattgtcgcacctgattgcccgacattatcgcgagcccatttatacccatataaatcagcatccatgttggaatttaatcgcggcctcgacgtttcccgttgaatatggctcataacaccccttgtattactgtttatgtaagcagacagttttattgttcatgatgatatatttttatcttgtgcaatgtaacatcagagattttgagacacgggccagagctgca

SEQ ID NO: 90 - DNA, 12588 bp, synthetic construct
  source 1..12588: mol_type = other DNA
tcgcgcgtttcggtgatgacggtgaaaacctctgacacatgcagctcccggagacggtcacagcttgtctgtaagcggatgccgggagcagacaagcccgtcagggcgcgtcagcgggtgttggcgggtgtcggggctggcttaactatgcggcatcagagcagattgtactgagagtgcaccatatgcggtgtgaaataccgcacagatgcgtaaggagaaaataccgcatcaggcgccattcgccattcaggctgcgcaactgttgggaagggcgatcggtgcgggcctcttcgctattacgccagctggcgaaagggggatgtgctgcaaggcgattaagttgggtaacgccagggttttcccagtcacgacgttgtaaaacgacggccagagaattccgcagggtctccattttgaagcgggaggtttgaacgcgcagccgccatgccggggttttacgagattgtgattaaggtccccagcgaccttgacgagcatctgcccggcatttctgacagctttgtgaactgggtggccgagaaggaatgggagttgccgccagattctgacatggatctgaatctgattgagcaggcacccctgaccgtggccgagaagctgcagcgcgactttctgacggaatggcgccgtgtgagtaaggccccggaggctcttttctttgtgcaatttgagaagggagagagctacttccacatgcacgtgctcgtggaaaccaccggggtgaaatccatggttttgggacgtttcctgagtcagattcgcgaaaaactgattcagagaatttaccgcgggatcgagccgactttgccaaactggttcgcggtcacaaagaccagaaatggcgccggaggcgggaacaaggtggtggatgagtgctacatccccaattacttgctccccaaaacccagcctgagctccagtgggcgtggactaatatggaacagtatttaagcgcctgtttgaatctcacggagcgtaaacggttggtggcgcagcatctgacgcacgtgtcgcagacgcaggagcagaacaaagagaatcagaatcccaattctgatgcgccggtgatcagatcaaaaacttcagccaggtacatggagctggtcgggtggctcgtggacaaggggattacctcggagaagcagtggatccaggaggaccaggcctcatacatctccttcaatgcggcctccaactcgcggtcccaaatcaaggctgccttggacaatgcgggaaagattatgagcctgactaaaaccgcccccgactacctggtgggccagcagcccgtggaggacatttccagcaatcggatttataaaattttggaactaaacgggtacgatccccaatatgcggcttccgtctttctgggatgggccacgaaaaagttcggcaagaggaacaccatctggctgtttgggcctgcaactaccgggaagaccaacatcgcggaggccatagcccacactgtgcccttctacgggtgcgtaaactggaccaatgagaactttcccttcaacgactgtgtcgacaagatggtgatctggtgggaggaggggaagatgaccgccaaggtcgtggagtcggccaaagccattctcggaggaagcaaggtgcgcgtggaccagaaatgcaagtcctcggcccagatagacccgactcccgtgatcgtcacctccaacaccaacatgtgcgccgtgattgacgggaactcaacgaccttcgaacaccagcagccgttgcaagaccggatgttcaaatttgaactcacccgccgtctggatcatgactttgggaaggtcaccaagcaggaagtcaaagactttttccggtgggcaaaggatcacgtggttgaggtggagcatgaattctacgtcaaaaagggtggagccaagaaaagacccgcccccagtgacgcagatataagtgagcccaaacgggtgcgcgagtcagttgcgcagccatcgacgtcagacgcggaagcttcgatcaactacgcagacaggtaccaaaacaaatgttctcgtcacgtgggcatgaatctgatgctgtttccctgcagacaatgcgagagaatgaatcagaattcaaatatctgcttcactcacggacagaaagactgtttagagtgctttcccgtgtcagaatctcaacccgtttctgtcgtcaaaaaggcgtatcagaaactgtgctacattcatcatatcatgggaaaggtgccagacgcttgcactgcctgcgatctggtcaatgtggatttggatgactgcatctttgaacaataaatgatttaaatcaggtatggctgccgatggttatcttccagattggctcgaggacaacctctctgagggcattcgcgagtggtgggcgctgaaacctggagccccgaagcccaaagccaaccagcaaaagcaggacgacggccggggtctggtgcttcctggctacaagtacctcggacccttcaacggactcgacaagggggagcccgtcaacgcggcggacgcagcggccctcgagcacgacaaggcctacgaccagcagctgcaggcgggtgacaatccgtacctgcggtataaccacgccgacgccgagtttcaggagcgtctgcaagaagatacgtcttttgggggcaacctcgggcgagcagtcttccaggccaagaagcgggttctcgaacctctcggtctggttgaggaaggcgctaagacggctcctggaaagaagagaccggtagagccatcaccccagcgttctccagactcctctacgggcatcggcaagaaaggccaacagcccgccagaaaaagactcaattttggtcagactggcgactcagagtcagttccagaccctcaacctctcggagaacctccagcagcgccctctggtgtgggacctaatacaatggctgcaggcggtggcgcaccaatggcagacaataacgaaggcgccgacggagtgggtagttcctcgggaaattggcattgcgattccacatggctgggcgacagagtcatcaccaccagcacccgaacctgggccctgcccacctacaacaaccacctctacaagcaaatctccaacgggacatcgggaggagccaccaacgacaacacctacttcggctacagcaccccctgggggtattttgactttaacagattccactgccacttttcaccacgtgactggcagcgactcatcaacaacaactggggattccggcccaagagactcagcttcaagctcttcaacatccaggtcaaggaggtcacgcagaatgaaggcaccaagaccatcgccaataacctcaccagcaccatccaggtgtttacggactcggagtaccagctgccgtacgttctcggctctgcccaccagggctgcctgcctccgttcccggcggacgtgttcatgattccccagtacggctacctaacactcaacaacggtagtcaggccgtgggacgctcctccttctactgcctggaatactttccttcgcagatgctgagaaccggcaacaacttccagtttacttacaccttcgaggacgtgcctttccacagcagctacgcccacagccagagcttggaccggctgatgaatcctctgattgaccagtacctgtactacttgtctcggactcaaacaacaggaggcacggcaaatacgcagactctgggcttcagccaaggtgggcctaatacaatggccaatcaggcaaagaactggctgccaggaccctgttaccgccaacaacgcgtctcaacgacaaccgggcaaaacaacaatagcaactttgcctggactgctgggaccaaataccatctgaatggaagaaattcattggctaatcctggcatcgctatggcaacacacaaagacgacgaggagcgtttttttcccagtaacgggatcctgatttttggcaaacaaaatgctgccagagacaatgcggattacagcgatgtcatgctcaccagcgaggaagaaatcaaaaccactaaccctgtggctacagaggaatacggtatcgtggcagataacttgcagcagcaaaacacggctcctcaaattggaactgtcaacagccagggggccttacccggtatggtctggcagaaccgggacgtgtacctgcagggtcccatctgggccaagattcctcacacggacggcaacttccacccgtctccgctgatgggcggctttggcctgaaacatcctccgcctcagatcctgatcaagaacacgcctgtacctgcggatcctccgaccaccttcaaccagtcaaagctgaactctttcatcacgcaatacagcaccggacaggtcagcgtggaaattgaatgggagctgcagaaggaaaacagcaagcgctggaaccccgagatccagtacacctccaactactacaaatctacaagtgtggactttgctgttaatacagaaggcgtgtactctgaaccccgccccattggcacccgttacctcacccgtaatctgtaattgcctgttaatcaataaaccggttgattcgtttcagttgaactttggtctctgcgaagggcgaattcgtttaaacctgcaggactagagccgaattctgcatcgcgatagggataacagggtaataaataatgtactagagacactttcaataaaggcaaatgcttttatttgtacactctcgggtgattatttacccccacccttgccgtctgcgccgtttaaaaatcaaaggggttctgccgcgcatcgctatgcgccactggcagggacacgttgcgatactggtgtttagtgctccacttaaactcaggcacaaccatccgcggcagctcggtgaagttttcactccacaggctgcgcaccatcaccaacgcgtttagcaggtcgggcgccgatatcttgaagtcgcagttggggcctccgccctgcgcgcgcgagttgcgatacacagggttgcagcactggaacactatcagcgccgggtggtgcacgctggccagcacgctcttgtcggagatcagatccgcgtccaggtcctccgcgttgctcagggcgaacggagtcaactttggtagctgccttcccaaaaagggcgcgtgcccaggctttgagttgcactcgcaccgtagtggcatcaaaaggtgaccgtgcccggtctgggcgttaggatacagcgcctgcataaaagccttgatctgcttaaaagccacctgagcctttgcgccttcagagaagaacatgccgcaagacttgccggaaaactgattggccggacaggccgcgtcgtgcacgcagcaccttgcgtcggtgttggagatctgcaccacatttcggccccaccggttcttcacgatcttggccttgctagactgctccttcagcgcgcgctgcccgttttcgctcgtcacatccatttcaatcacgtgctccttatttatcataatgcttccgtgtagacacttaagctcgccttcgatctcagcgcagcggtgcagccacaacgcgcagcccgtgggctcgtgatgcttgtaggtcacctctgcaaacgactgcaggtacgcctgcaggaatcgccccatcatcgtcacaaaggtcttgttgctggtgaaggtcagctgcaacccgcggtgctcctcgttcagccaggtcttgcatacggccgccagagcttccacttggtcaggcagtagtttgaagttcgcctttagatcgttatccacgtggtacttgtccatcagcgcgcgcgcagcctccatgcccttctcccacgcagacacgatcggcacactcagcgggttcatcaccgtaatttcactttccgcttcgctgggctcttcctcttcctcttgcgtccgcataccacgcgccactgggtcgtcttcattcagccgccgcactgtgcgcttacctcctttgccatgcttgattagcaccggtgggttgctgaaacccaccatttgtagcgccacatcttctctttcttcctcgctgtccacgattacctctggtgatggcgggcgctcgggcttgggagaagggcgcttctttttcttcttgggcgcaatggccaaatccgccgccgaggtcgatggccgcgggctgggtgtgcgcggcaccagcgcgtcttgtgatgagtcttcctcgtcctcggactcgatacgccgcctcatccgcttttttgggggcgcccggggaggcggcggcgacggggacggggacgacacgtcctccatggttgggggacgtcgcgccgcaccgcgtccgcgctcgggggtggtttcgcgctgctcctcttcccgactggccatttccttctcctataggcagaaaaagatcgttgaaactcactccggggctgtggacgtcggcttaccttcgcaaatttgtacctgaggactaccacgcccacgagattaggttctacgaagaccaatcccgcccgcctaatgcggagcttaccgcctgcgtcattacccagggccacattcttggccaattgcaagccatcaacaaagcccgccaagagtttctgctacgaaagggacggggggtttacttggacccccagtccggcgaggagctcaacccaatccccccgccgccgcagccctatcagcagcagccgcgggcccttgcttcccaggatggcacccaaaaagaagctgcagctgccgccgccacccacggacgaggaggaatactgggacagtcaggcagaggaggttttggacgaggaggaggaggacatgatggaagactgggagagcctagacgaggaagcttccgaggtcgaagaggtgtcagacgaaacaccgtcaccctcggtcgcattcccctcgccggcgccccagaaatcggcaaccggttccagcatggctacaacctccgctcctcaggcgccgccggcactgcccgttcgccgacccaaccgtagatgggacaccactggaaccagggccggtaagtccaagcagccgccgccgttagcccaagagcaacaacagcgccaaggctaccgctcatggcgcgggcacaagaacgccatagttgcttgcttgcaagactgtgggggcaacatctccttcgcccgccgctttcttctctaccatcacggcgtggccttcccccgtaacatcctgcattactaccgtcatctctacagcccatactgcaccggcggcagcggcagcaacagcagcggccacacagaagcaaaggcgaccggatagcaagactctgacaaagcccaagaaatccacagcggcggcagcagcaggaggaggagcgctgcgtctggcgcccaacgaacccgtatcgacccgcgagcttagaaacaggatttttcccactctgtatgctatatttcaacagagcaggggccaagaacaagagctgaaaataaaaaacaggtctctgcgatccctcacccgcagctgcctgtatcacaaaagcgaagatcagcttcggcgcacgctggaagacgcggaggctctcttcagtaaatactgcgcgctgactcttaaggactagtttcgcgccctttctcaaatttaagcgcgaaaactacgtcatctccagcggccacacccggcgccagcacctgttgtcagcgccattttttagggcggagtaacttgtatgtgttgggaattgtagttttcttaaaatgggaagtgacgtaacgtgggaaaacggaagtgacgatttgaggaagttgtgggttttttggctttcgtttctgggcgtaggttcgcgtgcggttttctgggtgttttttgtggactttaaccgttacgtcattttttagtcctatatatactcgctctgcacttggcccttttttacactgtgactgattgagctggtgccgtgtcgagtggtgtttttttaataggttttcttttttactggtaaggctgactgttatgactacgtccggcgttccatttggcatgacactacgaccaacacgatctcggttgtctcggcgcactccgtacagtagggatcgtctacctccttttgagacagaaacccgcgctaccatactggaggatcatccgctgctgcccgaatgtaacactttgacaatgcacaacgtgagttacgtgcgaggtcttccctgcagtgtgggatttacgctgattcaggaatgggttgttccctgggatatggttctaacgcgggaggagcttgtaatcctgaggaagtgtatgcacgtgtgcctgtgttgtgccaacattgatatcatgacgagcatgatgatccatggttacgagtcctgggctctccactgtcattgttccagtcccggttccctgcagtgtatagccggcgggcaggttttggccagctggtttaggatggtggtggatggcgccatgtttaatcagaggtttatatggtaccgggaggtggtgaattacaacatgccaaaagaggtaatgtttatgtccagcgtgtttatgaggggtcgccacttaatctacctgcgcttgtggtatgatggccacgtgggttctgtggtccccgccatgagctttggatacagcgccttgcactgtgggattttgaacaatattgtggtgctgtgctgcagttactgtgctgatttaagtgagatcagggtgcgctgctgtgcccggaggacaaggcgccttatgctgcgggcggtgcgaatcatcgctgaggagaccactgccatgttgtattcctgcaggacggagcggcggcggcagcagtttattcgcgcgctgctgcagcaccaccgccctatcctgatgcacgattatgactctacccccatgtaggcgtggacttctccttcgccgcccgttaagcaaccgcaagttggacagcagcctgtggctcagcagctggacagcgacatgaacttaagtgagctgcccggggagtttattaatatcactgatgagcgtttggctcgacaggaaaccgtgtggaatataacacctaagaatatgtctgttacccatgatatgatgctttttaaggccagccggggagaaaggactgtgtactctgtgtgttgggagggaggtggcaggttgaatactagggttctgtgagtttgattaaggtacggtgatctgtataagctatgtggtggtggggctatactactgaatgaaaaatgacttgaaattttctgcaattgaaaaataaacacgttgaaacataacacaaacgattctttattcttgggcaatgtatgaaaaagtgtaagaggatgtggcaaatatttcattaatgtagttgtggccagaccagtcccatgaaaatgacatagagtaaggtcctgtattagaggtcacgtgagtgttttgcgacattttgcgacaccatgtggtcacgctgggtatttaagcccgagtgagcacgcagggtctccattttgaagcgggaggtttgaacgcgcagccgccatgcacttggagttgtgtctcctgtttcctgtgtaccgtttagtgtaatggttagtgttacaggtttagttttgtctccgtttaagtaaacttgactgacaatgttacttttggcagttttaccgtgagattttggataagctgataggttaggcataaatccaacagcgtttgtataggctgtcgcccctcctgacgcggtaggaggaggggagggtgccctgcatgtctgccgctgctcttgctcttgccgctgctgaggaggggggcgcatctgccgcagcaccggatgcatctgggaaaagcaaaaaaggggctcgtccctgtttccggaggaatttgcaagcggggtcttgcatgacggggaggcaaacccccgttcgccgcagtccggccggtccgagactcgaaccgggggtcccgcgactcaacccttggaaaataaccctccggctacagggagcgagccacttaatgctttcgctttccagcctaaccgcttacgctgcgcgcggccagtggccaaaaaagctagcgcagcagccgccgcgcctggaaggaagccaaaaggagcactcccccgttgtctgacgtcgcacacctgggttcgacacgcgggcggtaaccgcatggatcacggcggacggccggatacggggctcgaaccccggtcgtccgccatgatacccttgcgaatttatccaccagaccacggaagagtgcccgcttacaggctctccttttgcacggtctagagcgtcaacgattgcgcgcgcctgaccggccagagcgtcccgaccatggagcactttttgccgctgcgcaacatctggaaccgcgtccgcgactttccgcgcgcctccaccaccgccgccggcatcacctggatgtccaggtacatctacggatatggcaaacagctattatgggtattatgggtgcggccgcggatcccgggcccgtcgactgcagaggcctgcatgcaagcttggtgtaatcatggtcatagctgtttcctgtgtgaaattgttatccgctcacaattccacacaacatacgagccggaagcataaagtgtaaagcctggggtgcctaatgagtgagctaactcacattaattgcgttgcgctcactgcccgctttccagtcgggaaacctgtcgtgccagctgcattaatgaatcggccaacgcgcggggagaggcggtttgcgtattgggcgctcttccgcttcctcgctcactgactcgctgcgctcggtcgttcggctgcggcgagcggtatcagctcactcaaaggcggtaatacggttatccacagaatcaggggataacgcaggaaagaacatgtgagcaaaaggccagcaaaaggccaggaaccgtaaaaaggccgcgttgctggcgtttttccataggctccgcccccctgacgagcatcacaaaaatcgacgctcaagtcagaggtggcgaaacccgacaggactataaagataccaggcgtttccccctggaagctccctcgtgcgctctcctgttccgaccctgccgcttaccggatacctgtccgcctttctcccttcgggaagcgtggcgctttctcatagctcacgctgtaggtatctcagttcggtgtaggtcgttcgctccaagctgggctgtgtgcacgaaccccccgttcagcccgaccgctgcgccttatccggtaactatcgtcttgagtccaacccggtaagacacgacttatcgccactggcagcagccactggtaacaggattagcagagcgaggtatgtaggcggtgctacagagttcttgaagtggtggcctaactacggctacactagaagaacagtatttggtatctgcgctctgctgaagccagttaccttcggaaaaagagttggtagctcttgatccggcaaacaaaccaccgctggtagcggtggtttttttgtttgcaagcagcagattacgcgcagaaaaaaaggatctcaagaagatcctttgatcttttctacggggtctgacgctcagtggaacgaaaactcacgttaagggattttggtcatgagattatcaaaaaggatcttcacctagatccttttaaattaaaaatgaagttttaaatcaagcccaatctgaataatgttacaaccaattaaccaattctgattagaaaaactcatcgagcatcaaatgaaactgcaatttattcatatcaggattatcaataccatatttttgaaaaagccgtttctgtaatgaaggagaaaactcaccgaggcagttccataggatggcaagatcctggtatcggtctgcgattccgactcgtccaacatcaatacaacctattaatttcccctcgtcaaaaataaggttatcaagtgagaaatcaccatgagtgacgactgaatccggtgagaatggcaaaagtttatgcatttctttccagacttgttcaacaggccagccattacgctcgtcatcaaaatcactcgcatcaaccaaaccgttattcattcgtgattgcgcctgagcgagacgaaatacgcgatcgctgttaaaaggacaattacaaacaggaatcgaatgcaaccggcgcaggaacactgccagcgcatcaacaatattttcacctgaatcaggatattcttctaatacctggaatgctgtttttccggggatcgcagtggtgagtaaccatgcatcatcaggagtacggataaaatgcttgatggtcggaagaggcataaattccgtcagccagtttagtctgaccatctcatctgtaacatcattggcaacgctacctttgccatgtttcagaaacaactctggcgcatcgggcttcccatacaagcgatagattgtcgcacctgattgcccgacattatcgcgagcccatttatacccatataaatcagcatccatgttggaatttaatcgcggcctcgacgtttcccgttgaatatggctcataacaccccttgtattactgtttatgtaagcagacagttttattgttcatgatgatatatttttatcttgtgcaatgtaacatcagagattttgagacacgggccagagctgca

SEQ ID NO: 91 - DNA, 12588 bp, synthetic construct
  source 1..12588: mol_type = other DNA
tcgcgcgtttcggtgatgacggtgaaaacctctgacacatgcagctcccggagacggtcacagcttgtctgtaagcggatgccgggagcagacaagcccgtcagggcgcgtcagcgggtgttggcgggtgtcggggctggcttaactatgcggcatcagagcagattgtactgagagtgcaccatatgcggtgtgaaataccgcacagatgcgtaaggagaaaataccgcatcaggcgccattcgccattcaggctgcgcaactgttgggaagggcgatcggtgcgggcctcttcgctattacgccagctggcgaaagggggatgtgctgcaaggcgattaagttgggtaacgccagggttttcccagtcacgacgttgtaaaacgacggccagagaattccgcagggtctccattttgaagcgggaggtttgaacgcgcagccgccatgccggggttttacgagattgtgattaaggtccccagcgaccttgacgagcatctgcccggcatttctgacagctttgtgaactgggtggccgagaaggaatgggagttgccgccagattctgacatggatctgaatctgattgagcaggcacccctgaccgtggccgagaagctgcagcgcgactttctgacggaatggcgccgtgtgagtaaggccccggaggctcttttctttgtgcaatttgagaagggagagagctacttccacatgcacgtgctcgtggaaaccaccggggtgaaatccatggttttgggacgtttcctgagtcagattcgcgaaaaactgattcagagaatttaccgcgggatcgagccgactttgccaaactggttcgcggtcacaaagaccagaaatggcgccggaggcgggaacaaggtggtggatgagtgctacatccccaattacttgctccccaaaacccagcctgagctccagtgggcgtggactaatatggaacagtatttaagcgcctgtttgaatctcacggagcgtaaacggttggtggcgcagcatctgacgcacgtgtcgcagacgcaggagcagaacaaagagaatcagaatcccaattctgatgcgccggtgatcagatcaaaaacttcagccaggtacatggagctggtcgggtggctcgtggacaaggggattacctcggagaagcagtggatccaggaggaccaggcctcatacatctccttcaatgcggcctccaactcgcggtcccaaatcaaggctgccttggacaatgcgggaaagattatgagcctgactaaaaccgcccccgactacctggtgggccagcagcccgtggaggacatttccagcaatcggatttataaaattttggaactaaacgggtacgatccccaatatgcggcttccgtctttctgggatgggccacgaaaaagttcggcaagaggaacaccatctggctgtttgggcctgcaactaccgggaagaccaacatcgcggaggccatagcccacactgtgcccttctacgggtgcgtaaactggaccaatgagaactttcccttcaacgactgtgtcgacaagatggtgatctggtgggaggaggggaagatgaccgccaaggtcgtggagtcggccaaagccattctcggaggaagcaaggtgcgcgtggaccagaaatgcaagtcctcggcccagatagacccgactcccgtgatcgtcacctccaacaccaacatgtgcgccgtgattgacgggaactcaacgaccttcgaacaccagcagccgttgcaagaccggatgttcaaatttgaactcacccgccgtctggatcatgactttgggaaggtcaccaagcaggaagtcaaagactttttccggtgggcaaaggatcacgtggttgaggtggagcatgaattctacgtcaaaaagggtggagccaagaaaagacccgcccccagtgacgcagatataagtgagcccaaacgggtgcgcgagtcagttgcgcagccatcgacgtcagacgcggaagcttcgatcaactacgcagacaggtaccaaaacaaatgttctcgtcacgtgggcatgaatctgatgctgtttccctgcagacaatgcgagagaatgaatcagaattcaaatatctgcttcactcacggacagaaagactgtttagagtgctttcccgtgtcagaatctcaacccgtttctgtcgtcaaaaaggcgtatcagaaactgtgctacattcatcatatcatgggaaaggtgccagacgcttgcactgcctgcgatctggtcaatgtggatttggatgactgcatctttgaacaataaatgatttaaatcaggtatggctgccgatggttatcttccagattggctcgaggacaacctctctgagggcattcgcgagtggtgggcgctgaaacctggagccccgaagcccaaagccaaccagcaaaagcaggacgacggccggggtctggtgcttcctggctacaagtacctcggacccttcaacggactcgacaagggggagcccgtcaacgcggcggacgcagcggccctcgagcacgacaaggcctacgaccagcagctgcaggcgggtgacaatccgtacctgcggtataaccacgccgacgccgagtttcaggagcgtctgcaagaagatacgtcttttgggggcaacctcgggcgagcagtcttccaggccaagaagcgggttctcgaacctctcggtctggttgaggaaggcgctaagacggctcctggaaagaagagaccggtagagccatcaccccagcgttctccagactcctctacgggcatcggcaagaaaggccaacagcccgccagaaaaagactcaattttggtcagactggcgactcagagtcagttccagaccctcaacctctcggagaacctccagcagcgccctctggtgtgggacctaatacaatggctgcaggcggtggcgcaccaatggcagacaataacgaaggcgccgacggagtgggtagttcctcgggaaattggcattgcgattccacatggctgggcgacagagtcatcaccaccagcacccgaacctgggccctgcccacctacaacaaccacctctacaagcaaatctccaacgggacatcgggaggagccaccaacgacaacacctacttcggctacagcaccccctgggggtattttgactttaacagattccactgccacttttcaccacgtgactggcagcgactcatcaacaacaactggggattccggcccaagagactcagcttcaagctcttcaacatccaggtcaaggaggtcacgcagaatgaaggcaccaagaccatcgccaataacctcaccagcaccatccaggtgtttacggactcggagtaccagctgccgtacgttctcggctctgcccaccagggctgcctgcctccgttcccggcggacgtgttcatgattccccagtacggctacctaacactcaacaacggtagtcaggccgtgggacgctcctccttctactgcctggaatactttccttcgcagatgctgagaaccggcaacaacttccagtttacttacaccttcgaggacgtgcctttccacagcagctacgcccacagccagagcttggaccggctgatgaatcctctgattgaccagtacctgtactacttgtctcggactcaaacaacaggaggcacggcaaatacgcagactctgggcttcagccaaggtgggcctaatacaatggccaatcaggcaaagaactggctgccaggaccctgttaccgccaacaacgcgtctcaacgacaaccgggcaaaacaacaatagcaactttgcctggactgctgggaccaaataccatctgaatggaagaaattcattggctaatcctggcatcgctatggcaacacacaaagacgacgaggagcgtttttttcccagtaacgggatcctgatttttggcaaacaaaatgctgccagagacaatgcggattacagcgatgtcatgctcaccagcgaggaagaaatcaaaaccactaaccctgtggctacagaggaatacggtatcgtggcagataacttgcagcagcaaaacacggctcctcaaattggaactgtcaacagccagggggccttacccggtatggtctggcagaaccgggacgtgtacctgcagggtcccatctgggccaagattcctcacacggacggcaacttccacccgtctccgctgatgggcggctttggcctgaaacatcctccgcctcagatcctgatcaagaacacgcctgtacctgcggatcctccgaccaccttcaaccagtcaaagctgaactctttcatcacgcaatacagcaccggacaggtcagcgtggaaattgaatgggagctgcagaaggaaaacagcaagcgctggaaccccgagatccagtacacctccaactactacaaatctacaagtgtggactttgctgttaatacagaaggcgtgtactctgaaccccgccccattggcacccgttacctcacccgtaatctgtaattgcctgttaatcaataaaccggttgattcgtttcagttgaactttggtctctgcgaagggcgaattcgtttaaacctgcaggactagagccgaattctgcatcgcgatagggataacagggtaataaataatgtactagagacactttcaataaaggcaaatgcttttatttgtacactctcgggtgattatttacccccacccttgccgtctgcgccgtttaaaaatcaaaggggttctgccgcgcatcgctatgcgccactggcagggacacgttgcgatactggtgtttagtgctccacttaaactcaggcacaaccatccgcggcagctcggtgaagttttcactccacaggctgcgcaccatcaccaacgcgtttagcaggtcgggcgccgatatcttgaagtcgcagttggggcctccgccctgcgcgcgcgagttgcgatacacagggttgcagcactggaacactatcagcgccgggtggtgcacgctggccagcacgctcttgtcggagatcagatccgcgtccaggtcctccgcgttgctcagggcgaacggagtcaactttggtagctgccttcccaaaaagggcgcgtgcccaggctttgagttgcactcgcaccgtagtggcatcaaaaggtgaccgtgcccggtctgggcgttaggatacagcgcctgcataaaagccttgatctgcttaaaagccacctgagcctttgcgccttcagagaagaacatgccgcaagacttgccggaaaactgattggccggacaggccgcgtcgtgcacgcagcaccttgcgtcggtgttggagatctgcaccacatttcggccccaccggttcttcacgatcttggccttgctagactgctccttcagcgcgcgctgcccgttttcgctcgtcacatccatttcaatcacgtgctccttatttatcataatgcttccgtgtagacacttaagctcgccttcgatctcagcgcagcggtgcagccacaacgcgcagcccgtgggctcgtgatgcttgtaggtcacctctgcaaacgactgcaggtacgcctgcaggaatcgccccatcatcgtcacaaaggtcttgttgctggtgaaggtcagctgcaacccgcggtgctcctcgttcagccaggtcttgcatacggccgccagagcttccacttggtcaggcagtagtttgaagttcgcctttagatcgttatccacgtggtacttgtccatcagcgcgcgcgcagcctccatgcccttctcccacgcagacacgatcggcacactcagcgggttcatcaccgtaatttcactttccgcttcgctgggctcttcctcttcctcttgcgtccgcataccacgcgccactgggtcgtcttcattcagccgccgcactgtgcgcttacctcctttgccatgcttgattagcaccggtgggttgctgaaacccaccatttgtagcgccacatcttctctttcttcctcgctgtccacgattacctctggtgatggcgggcgctcgggcttgggagaagggcgcttctttttcttcttgggcgcaatggccaaatccgccgccgaggtcgatggccgcgggctgggtgtgcgcggcaccagcgcgtcttgtgatgagtcttcctcgtcctcggactcgatacgccgcctcatccgcttttttgggggcgcccggggaggcggcggcgacggggacggggacgacacgtcctccatggttgggggacgtcgcgccgcaccgcgtccgcgctcgggggtggtttcgcgctgctcctcttcccgactggccatttccttctcctataggcagaaaaagatcgttgaaactcactccggggctgtggacgtcggcttaccttcgcaaatttgtacctgaggactaccacgcccacgagattaggttctacgaagaccaatcccgcccgcctaatgcggagcttaccgcctgcgtcattacccagggccacattcttggccaattgcaagccatcaacaaagcccgccaagagtttctgctacgaaagggacggggggtttacttggacccccagtccggcgaggagctcaacccaatccccccgccgccgcagccctatcagcagcagccgcgggcccttgcttcccaggatggcacccaaaaagaagctgcagctgccgccgccacccacggacgaggaggaatactgggacagtcaggcagaggaggttttggacgaggaggaggaggacatgatggaagactgggagagcctagacgaggaagcttccgaggtcgaagaggtgtcagacgaaacaccgtcaccctcggtcgcattcccctcgccggcgccccagaaatcggcaaccggttccagcatggctacaacctccgctcctcaggcgccgccggcactgcccgttcgccgacccaaccgtagatgggacaccactggaaccagggccggtaagtccaagcagccgccgccgttagcccaagagcaacaacagcgccaaggctaccgctcatggcgcgggcacaagaacgccatagttgcttgcttgcaagactgtgggggcaacatctccttcgcccgccgctttcttctctaccatcacggcgtggccttcccccgtaacatcctgcattactaccgtcatctctacagcccatactgcaccggcggcagcggcagcaacagcagcggccacacagaagcaaaggcgaccggatagcaagactctgacaaagcccaagaaatccacagcggcggcagcagcaggaggaggagcgctgcgtctggcgcccaacgaacccgtatcgacccgcgagcttagaaacaggatttttcccactctgtatgctatatttcaacagagcaggggccaagaacaagagctgaaaataaaaaacaggtctctgcgatccctcacccgcagctgcctgtatcacaaaagcgaagatcagcttcggcgcacgctggaagacgcggaggctctcttcagtaaatactgcgcgctgactcttaaggactagtttcgcgccctttctcaaatttaagcgcgaaaactacgtcatctccagcggccacacccggcgccagcacctgttgtcagcgccattttttagggcggagtaacttgtatgtgttgggaattgtagttttcttaaaatgggaagtgacgtaacgtgggaaaacggaagtgacgatttgaggaagttgtgggttttttggctttcgtttctgggcgtaggttcgcgtgcggttttctgggtgttttttgtggactttaaccgttacgtcattttttagtcctatatatactcgctctgcacttggcccttttttacactgtgactgattgagctggtgccgtgtcgagtggtgtttttttaataggttttcttttttactggtaaggctgactgttatgactacgtccggcgttccatttggcatgacactacgaccaacacgatctcggttgtctcggcgcactccgtacagtagggatcgtctacctccttttgagacagaaacccgcgctaccatactggaggatcatccgctgctgcccgaatgtaacactttgacaatgcacaacgtgagttacgtgcgaggtcttccctgcagtgtgggatttacgctgattcaggaatgggttgttccctgggatatggttctaacgcgggaggagcttgtaatcctgaggaagtgtatgcacgtgtgcctgtgttgtgccaacattgatatcatgacgagcatgatgatccatggttacgagtcctgggctctccactgtcattgttccagtcccggttccctgcagtgtatagccggcgggcaggttttggccagctggtttaggatggtggtggatggcgccatgtttaatcagaggtttatatggtaccgggaggtggtgaattacaacatgccaaaagaggtaatgtttatgtccagcgtgtttatgaggggtcgccacttaatctacctgcgcttgtggtatgatggccacgtgggttctgtggtccccgccatgagctttggatacagcgccttgcactgtgggattttgaacaatattgtggtgctgtgctgcagttactgtgctgatttaagtgagatcagggtgcgctgctgtgcccggaggacaaggcgccttatgctgcgggcggtgcgaatcatcgctgaggagaccactgccatgttgtattcctgcaggacggagcggcggcggcagcagtttattcgcgcgctgctgcagcaccaccgccctatcctgatgcacgattatgactctacccccatgtaggcgtggacttctccttcgccgcccgttaagcaaccgcaagttggacagcagcctgtggctcagcagctggacagcgacatgaacttaagtgagctgcccggggagtttattaatatcactgatgagcgtttggctcgacaggaaaccgtgtggaatataacacctaagaatatgtctgttacccatgatatgatgctttttaaggccagccggggagaaaggactgtgtactctgtgtgttgggagggaggtggcaggttgaatactagggttctgtgagtttgattaaggtacggtgatctgtataagctatgtggtggtggggctatactactgaatgaaaaatgacttgaaattttctgcaattgaaaaataaacacgttgaaacataacacaaacgattctttattcttgggcaatgtatgaaaaagtgtaagaggatgtggcaaatatttcattaatgtagttgtggccagaccagtcccatgaaaatgacatagagtatgcacttggagttgtgtctcctgtttcctgtgtaccgtttagtgtaatggttagtgttacaggtttagttttgtctccgtttaagtaaacttgactgacaatgttacttttggcagttttaccgtgagattttggataagctgataggttaggcataaatccaacagcgtttgtataggctgtcgcccctcctgacgcggtaggaggaggggagggtgccctgcatgtctgccgctgctcttgctcttgccgctgctgaggaggggggcgcatctgccgcagcaccggatgcatctgggaaaagcaaaaaaggggctcgtccctgtttccggaggaatttgcaagcggggtcttgcatgacggggaggcaaacccccgttcgccgcagtccggccggtccgagactcgaaccgggggtcccgcgactcaacccttggaaaataaccctccggctacagggagcgagccacttaatgctttcgctttccagcctaaccgcttacgctgcgcgcggccagtggccaaaaaagctagcgcagcagccgccgcgcctggaaggaagccaaaaggagcactcccccgttgtctgacgtcgcacacctgggttcgacacgcgggcggtaaccgcatggatcacggcggacggccggatacggggctcgaaccccggtcgtccgccatgatacccttgcgaatttatccaccagaccacggaagagtgcccgcttacaggctctccttttgcacggtctagagcgtcaacgattgcgcgcgcctgaccggccagagcgtcccgaccatggagcactttttgccgctgcgcaacatctggaaccgcgtccgcgactttccgcgcgcctccaccaccgccgccggcatcacctggatgtccaggtacatctacggatatggcaaacagctattatgggtattatgggtgcggccgcggatcccgggcccgtcgactgcagaggcctgcatgcaagcttggtgtaatcatggtcatagctgtttcctgtgtgaaattgttatccgctcacaattccacacaacatacgagccggaagcataaagtgtaaagcctggggtgcctaatgagtgagctaactcacattaattgcgttgcgctcactgcccgctttccagtcgggaaacctgtcgtgccagctgcattaatgaatcggccaacgcgcggggagaggcggtttgcgtattgggcgctcttccgcttcctcgctcactgactcgctgcgctcggtcgttcggctgcggcgagcggtatcagctcactcaaaggcggtaatacggttatccacagaatcaggggataacgcaggaaagaacatgtgagcaaaaggccagcaaaaggccaggaaccgtaaaaaggccgcgttgctggcgtttttccataggctccgcccccctgacgagcatcacaaaaatcgacgctcaagtcagaggtggcgaaacccgacaggactataaagataccaggcgtttccccctggaagctccctcgtgcgctctcctgttccgaccctgccgcttaccggatacctgtccgcctttctcccttcgggaagcgtggcgctttctcatagctcacgctgtaggtatctcagttcggtgtaggtcgttcgctccaagctgggctgtgtgcacgaaccccccgttcagcccgaccgctgcgccttatccggtaactatcgtcttgagtccaacccggtaagacacgacttatcgccactggcagcagccactggtaacaggattagcagagcgaggtatgtaggcggtgctacagagttcttgaagtggtggcctaactacggctacactagaagaacagtatttggtatctgcgctctgctgaagccagttaccttcggaaaaagagttggtagctcttgatccggcaaacaaaccaccgctggtagcggtggtttttttgtttgcaagcagcagattacgcgcagaaaaaaaggatctcaagaagatcctttgatcttttctacggggtctgacgctcagtggaacgaaaactcacgttaagggattttggtcatgagattatcaaaaaggatcttcacctagaaggtcctgtattagaggtcacgtgagtgttttgcgacattttgcgacaccatgtggtcacgctgggtatttaagcccgagtgagcacgcagggtctccattttgaagcgggaggtttgaacgcgcagccgccatccttttaaattaaaaatgaagttttaaatcaagcccaatctgaataatgttacaaccaattaaccaattctgattagaaaaactcatcgagcatcaaatgaaactgcaatttattcatatcaggattatcaataccatatttttgaaaaagccgtttctgtaatgaaggagaaaactcaccgaggcagttccataggatggcaagatcctggtatcggtctgcgattccgactcgtccaacatcaatacaacctattaatttcccctcgtcaaaaataaggttatcaagtgagaaatcaccatgagtgacgactgaatccggtgagaatggcaaaagtttatgcatttctttccagacttgttcaacaggccagccattacgctcgtcatcaaaatcactcgcatcaaccaaaccgttattcattcgtgattgcgcctgagcgagacgaaatacgcgatcgctgttaaaaggacaattacaaacaggaatcgaatgcaaccggcgcaggaacactgccagcgcatcaacaatattttcacctgaatcaggatattcttctaatacctggaatgctgtttttccggggatcgcagtggtgagtaaccatgcatcatcaggagtacggataaaatgcttgatggtcggaagaggcataaattccgtcagccagtttagtctgaccatctcatctgtaacatcattggcaacgctacctttgccatgtttcagaaacaactctggcgcatcgggcttcccatacaagcgatagattgtcgcacctgattgcccgacattatcgcgagcccatttatacccatataaatcagcatccatgttggaatttaatcgcggcctcgacgtttcccgttgaatatggctcataacaccccttgtattactgtttatgtaagcagacagttttattgttcatgatgatatatttttatcttgtgcaatgtaacatcagagattttgagacacgggccagagctgca

SEQ ID NO: 92 - DNA, 12588 bp, synthetic construct
  source 1..12588: mol_type = other DNA
tcgcgcgtttcggtgatgacggtgaaaacctctgacacatgcagctcccggagacggtcacagcttgtctgtaagcggatgccgggagcagacaagcccgtcagggcgcgtcagcgggtgttggcgggtgtcggggctggcttaactatgcggcatcagagcagattgtactgagagtgcaccatatgcggtgtgaaataccgcacagatgcgtaaggagaaaataccgcatcaggcgccattcgccattcaggctgcgcaactgttgggaagggcgatcggtgcgggcctcttcgctattacgccagctggcgaaagggggatgtgctgcaaggcgattaagttgggtaacgccagggttttcccagtcacgacgttgtaaaacgacggccagagaattccgcagggtctccattttgaagcgggaggtttgaacgcgcagccgccatgccggggttttacgagattgtgattaaggtccccagcgaccttgacgagcatctgcccggcatttctgacagctttgtgaactgggtggccgagaaggaatgggagttgccgccagattctgacatggatctgaatctgattgagcaggcacccctgaccgtggccgagaagctgcagcgcgactttctgacggaatggcgccgtgtgagtaaggccccggaggctcttttctttgtgcaatttgagaagggagagagctacttccacatgcacgtgctcgtggaaaccaccggggtgaaatccatggttttgggacgtttcctgagtcagattcgcgaaaaactgattcagagaatttaccgcgggatcgagccgactttgccaaactggttcgcggtcacaaagaccagaaatggcgccggaggcgggaacaaggtggtggatgagtgctacatccccaattacttgctccccaaaacccagcctgagctccagtgggcgtggactaatatggaacagtatttaagcgcctgtttgaatctcacggagcgtaaacggttggtggcgcagcatctgacgcacgtgtcgcagacgcaggagcagaacaaagagaatcagaatcccaattctgatgcgccggtgatcagatcaaaaacttcagccaggtacatggagctggtcgggtggctcgtggacaaggggattacctcggagaagcagtggatccaggaggaccaggcctcatacatctccttcaatgcggcctccaactcgcggtcccaaatcaaggctgccttggacaatgcgggaaagattatgagcctgactaaaaccgcccccgactacctggtgggccagcagcccgtggaggacatttccagcaatcggatttataaaattttggaactaaacgggtacgatccccaatatgcggcttccgtctttctgggatgggccacgaaaaagttcggcaagaggaacaccatctggctgtttgggcctgcaactaccgggaagaccaacatcgcggaggccatagcccacactgtgcccttctacgggtgcgtaaactggaccaatgagaactttcccttcaacgactgtgtcgacaagatggtgatctggtgggaggaggggaagatgaccgccaaggtcgtggagtcggccaaagccattctcggaggaagcaaggtgcgcgtggaccagaaatgcaagtcctcggcccagatagacccgactcccgtgatcgtcacctccaacaccaacatgtgcgccgtgattgacgggaactcaacgaccttcgaacaccagcagccgttgcaagaccggatgttcaaatttgaactcacccgccgtctggatcatgactttgggaaggtcaccaagcaggaagtcaaagactttttccggtgggcaaaggatcacgtggttgaggtggagcatgaattctacgtcaaaaagggtggagccaagaaaagacccgcccccagtgacgcagatataagtgagcccaaacgggtgcgcgagtcagttgcgcagccatcgacgtcagacgcggaagcttcgatcaactacgcagacaggtaccaaaacaaatgttctcgtcacgtgggcatgaatctgatgctgtttccctgcagacaatgcgagagaatgaatcagaattcaaatatctgcttcactcacggacagaaagactgtttagagtgctttcccgtgtcagaatctcaacccgtttctgtcgtcaaaaaggcgtatcagaaactgtgctacattcatcatatcatgggaaaggtgccagacgcttgcactgcctgcgatctggtcaatgtggatttggatgactgcatctttgaacaataaatgatttaaatcaggtatggctgccgatggttatcttccagattggctcgaggacaacctctctgagggcattcgcgagtggtgggcgctgaaacctggagccccgaagcccaaagccaaccagcaaaagcaggacgacggccggggtctggtgcttcctggctacaagtacctcggacccttcaacggactcgacaagggggagcccgtcaacgcggcggacgcagcggccctcgagcacgacaaggcctacgaccagcagctgcaggcgggtgacaatccgtacctgcggtataaccacgccgacgccgagtttcaggagcgtctgcaagaagatacgtcttttgggggcaacctcgggcgagcagtcttccaggccaagaagcgggttctcgaacctctcggtctggttgaggaaggcgctaagacggctcctggaaagaagagaccggtagagccatcaccccagcgttctccagactcctctacgggcatcggcaagaaaggccaacagcccgccagaaaaagactcaattttggtcagactggcgactcagagtcagttccagaccctcaacctctcggagaacctccagcagcgccctctggtgtgggacctaatacaatggctgcaggcggtggcgcaccaatggcagacaataacgaaggcgccgacggagtgggtagttcctcgggaaattggcattgcgattccacatggctgggcgacagagtcatcaccaccagcacccgaacctgggccctgcccacctacaacaaccacctctacaagcaaatctccaacgggacatcgggaggagccaccaacgacaacacctacttcggctacagcaccccctgggggtattttgactttaacagattccactgccacttttcaccacgtgactggcagcgactcatcaacaacaactggggattccggcccaagagactcagcttcaagctcttcaacatccaggtcaaggaggtcacgcagaatgaaggcaccaagaccatcgccaataacctcaccagcaccatccaggtgtttacggactcggagtaccagctgccgtacgttctcggctctgcccaccagggctgcctgcctccgttcccggcggacgtgttcatgattccccagtacggctacctaacactcaacaacggtagtcaggccgtgggacgctcctccttctactgcctggaatactttccttcgcagatgctgagaaccggcaacaacttccagtttacttacaccttcgaggacgtgcctttccacagcagctacgcccacagccagagcttggaccggctgatgaatcctctgattgaccagtacctgtactacttgtctcggactcaaacaacaggaggcacggcaaatacgcagactctgggcttcagccaaggtgggcctaatacaatggccaatcaggcaaagaactggctgccaggaccctgttaccgccaacaacgcgtctcaacgacaaccgggcaaaacaacaatagcaactttgcctggactgctgggaccaaataccatctgaatggaagaaattcattggctaatcctggcatcgctatggcaacacacaaagacgacgaggagcgtttttttcccagtaacgggatcctgatttttggcaaacaaaatgctgccagagacaatgcggattacagcgatgtcatgctcaccagcgaggaagaaatcaaaaccactaaccctgtggctacagaggaatacggtatcgtggcagataacttgcagcagcaaaacacggctcctcaaattggaactgtcaacagccagggggccttacccggtatggtctggcagaaccgggacgtgtacctgcagggtcccatctgggccaagattcctcacacggacggcaacttccacccgtctccgctgatgggcggctttggcctgaaacatcctccgcctcagatcctgatcaagaacacgcctgtacctgcggatcctccgaccaccttcaaccagtcaaagctgaactctttcatcacgcaatacagcaccggacaggtcagcgtggaaattgaatgggagctgcagaaggaaaacagcaagcgctggaaccccgagatccagtacacctccaactactacaaatctacaagtgtggactttgctgttaatacagaaggcgtgtactctgaaccccgccccattggcacccgttacctcacccgtaatctgtaattgcctgttaatcaataaaccggttgattcgtttcagttgaactttggtctctgcgaagggcgaattcgtttaaacctgcaggactagagccgaattctgcatcgcgatagggataacagggtaataaataatgtactagagacactttcaataaaggcaaatgcttttatttgtacactctcgggtgattatttacccccacccttgccgtctgcgccgttcagaagtcgaaggggttctgtctggcatcggaatgggccacgggcagagacacgttccggtactggtgcttggtggaccacttgaactcaggcacgaccattctaggcagctctgtgaagttctcgctccacaggctccgcaccatcaccagggcgttcagcaggtcaggggcgctgattttgaagtcgcagttaggtccgccgccctgggctctgctgtttctgtacacagggttgcagcactggaacacaataagagcagggtggtgcacgctggccagcacagacttgtcgctgatcaggtcggcgtcgagatcctcggcgttagacaaggcaaaaggggtcagcttgggcagctggcggcccaggaaaggggcgtggccgggcttgctattgcactcgcatctcagaggcatcagcaggtggccgtggccggtctgggcgttggggtacagggcctgcataaaggccttgatctgtttgaaggccacttgggccttggcgccttcggagaagaacatgccgcagcttttgccgctgaactggttggcggggcaggcggcgtcgtgcacacaacaccgggcgtcggtattgctgatctgcaccacgtttctgccccatctgttcttcacgatcttggccttgctgctctgctctttcagggccctctggccgttctcagaggtgacgtccatctcgatcacatgttccttgttgatcatgatgctgccgtgcagacacttcagctcgccctcgatttccgcgcatctgtgcagccacagggcacaaccggtaggctcgtggtgcttgtatgtcacctcagcaaaagattgcaggtaggcttgcaggaatctgcccatcatggtcacgaaggtcttgttggaggtaaaagtcagctgcagtcctctgtgttcctcgttcagccatgtcttgcacacggcggccagagcctcgacctgatctggcagcagcttgaaattagccttcaggtcgttgtccacgtgatacttatccatcagtgctctggcggcttccatgcccttctcccaggcggaaacgatgggcacgctcagggggttcatcacggtgatctcgctttcagcttctgaaggttcctcctcttcctcctgtgttctcatgccccgagccacggggtcgtcctcattcagtctccgcacggttctttttcctccctttccgtgcttaatcagtacaggaggattagagaagcccaccatctggagggcgacgtcctccctttcttcttcgctatccacgatcacttctgggctggggggccgttcaggctttgggctaggccgtttttttttcttcttaggggcgatagccagatcagcggcgcttgtagagggccgaggactaggggttctaggcacgagggcgtcctggctgctgtcctcctcatcctcgctctcgatccgtctccgcattctcttcttagggggggcccgcggagggggagggctagggctaggggacgacacatcttccatggttggaggtctgcgagcagcgcctctgcctctctctggtgttgtctcgcgctgttcttcctctctagaggccatttccttctcctataggcagaaaaagatcgttgaaactcactccggggctgtggacgtcggcttaccttcgcaaatttgtacctgaggactaccacgcccacgagattaggttctacgaagaccaatcccgcccgcctaatgcggagcttaccgcctgcgtcattacccagggccacattcttggccaattgcaagccatcaacaaagcccgccaagagtttctgctacgaaagggacggggggtttacttggacccccagtccggcgaggagctcaacccaatccccccgccgccgcagccctatcagcagcagccgcgggcccttgcttcccaggatggcacccaaaaagaagctgcagctgccgccgccacccacggacgaggaggaatactgggacagtcaggcagaggaggttttggacgaggaggaggaggacatgatggaagactgggagagcctagacgaggaagcttccgaggtcgaagaggtgtcagacgaaacaccgtcaccctcggtcgcattcccctcgccggcgccccagaaatcggcaaccggttccagcatggctacaacctccgctcctcaggcgccgccggcactgcccgttcgccgacccaaccgtagatgggacaccactggaaccagggccggtaagtccaagcagccgccgccgttagcccaagagcaacaacagcgccaaggctaccgctcatggcgcgggcacaagaacgccatagttgcttgcttgcaagactgtgggggcaacatctccttcgcccgccgctttcttctctaccatcacggcgtggccttcccccgtaacatcctgcattactaccgtcatctctacagcccatactgcaccggcggcagcggcagcaacagcagcggccacacagaagcaaaggcgaccggatagcaagactctgacaaagcccaagaaatccacagcggcggcagcagcaggaggaggagcgctgcgtctggcgcccaacgaacccgtatcgacccgcgagcttagaaacaggatttttcccactctgtatgctatatttcaacagagcaggggccaagaacaagagctgaaaataaaaaacaggtctctgcgatccctcacccgcagctgcctgtatcacaaaagcgaagatcagcttcggcgcacgctggaagacgcggaggctctcttcagtaaatactgcgcgctgactcttaaggactagtttcgcgccctttctcaaatttaagcgcgaaaactacgtcatctccagcggccacacccggcgccagcacctgttgtcagcgccattttttagggcggagtaacttgtatgtgttgggaattgtagttttcttaaaatgggaagtgacgtaacgtgggaaaacggaagtgacgatttgaggaagttgtgggttttttggctttcgtttctgggcgtaggttcgcgtgcggttttctgggtgttttttgtggactttaaccgttacgtcattttttagtcctatatatactcgctctgcacttggcccttttttacactgtgactgattgagctggtgccgtgtcgagtggtgtttttttaataggttttcttttttactggtaaggctgactgttatgactacgtccggcgttccatttggcatgacactacgaccaacacgatctcggttgtctcggcgcactccgtacagtagggatcgtctacctccttttgagacagaaacccgcgctaccatactggaggatcatccgctgctgcccgaatgtaacactttgacaatgcacaacgtgagttacgtgcgaggtcttccctgcagtgtgggatttacgctgattcaggaatgggttgttccctgggatatggttctaacgcgggaggagcttgtaatcctgaggaagtgtatgcacgtgtgcctgtgttgtgccaacattgatatcatgacgagcatgatgatccatggttacgagtcctgggctctccactgtcattgttccagtcccggttccctgcagtgtatagccggcgggcaggttttggccagctggtttaggatggtggtggatggcgccatgtttaatcagaggtttatatggtaccgggaggtggtgaattacaacatgccaaaagaggtaatgtttatgtccagcgtgtttatgaggggtcgccacttaatctacctgcgcttgtggtatgatggccacgtgggttctgtggtccccgccatgagctttggatacagcgccttgcactgtgggattttgaacaatattgtggtgctgtgctgcagttactgtgctgatttaagtgagatcagggtgcgctgctgtgcccggaggacaaggcgccttatgctgcgggcggtgcgaatcatcgctgaggagaccactgccatgttgtattcctgcaggacggagcggcggcggcagcagtttattcgcgcgctgctgcagcaccaccgccctatcctgatgcacgattatgactctacccccatgtaggcgtggacttctccttcgccgcccgttaagcaaccgcaagttggacagcagcctgtggctcagcagctggacagcgacatgaacttaagtgagctgcccggggagtttattaatatcactgatgagcgtttggctcgacaggaaaccgtgtggaatataacacctaagaatatgtctgttacccatgatatgatgctttttaaggccagccggggagaaaggactgtgtactctgtgtgttgggagggaggtggcaggttgaatactagggttctgtgagtttgattaaggtacggtgatctgtataagctatgtggtggtggggctatactactgaatgaaaaatgacttgaaattttctgcaattgaaaaataaacacgttgaaacataacacaaacgattctttattcttgggcaatgtatgaaaaagtgtaagaggatgtggcaaatatttcattaatgtagttgtggccagaccagtcccatgaaaatgacatagagtatgcacttggagttgtgtctcctgtttcctgtgtaccgtttagtgtaatggttagtgttacaggtttagttttgtctccgtttaagtaaacttgactgacaatgttacttttggcagttttaccgtgagattttggataagctgataggttaggcataaatccaacagcgtttgtataggctgtcgcccctcctgacgcggtaggaggaggggagggtgccctgcatgtctgccgctgctcttgctcttgccgctgctgaggaggggggcgcatctgccgcagcaccggatgcatctgggaaaagcaaaaaaggggctcgtccctgtttccggaggaatttgcaagcggggtcttgcatgacggggaggcaaacccccgttcgccgcagtccggccggtccgagactcgaaccgggggtcccgcgactcaacccttggaaaataaccctccggctacagggagcgagccacttaatgctttcgctttccagcctaaccgcttacgctgcgcgcggccagtggccaaaaaagctagcgcagcagccgccgcgcctggaaggaagccaaaaggagcactcccccgttgtctgacgtcgcacacctgggttcgacacgcgggcggtaaccgcatggatcacggcggacggccggatacggggctcgaaccccggtcgtccgccatgatacccttgcgaatttatccaccagaccacggaagagtgcccgcttacaggctctccttttgcacggtctagagcgtcaacgattgcgcgcgcctgaccggccagagcgtcccgaccatggagcactttttgccgctgcgcaacatctggaaccgcgtccgcgactttccgcgcgcctccaccaccgccgccggcatcacctggatgtccaggtacatctacggatatggcaaacagctattatgggtattatgggtgcggccgcggatcccgggcccgtcgactgcagaggcctgcatgcaagcttggtgtaatcatggtcatagctgtttcctgtgtgaaattgttatccgctcacaattccacacaacatacgagccggaagcataaagtgtaaagcctggggtgcctaatgagtgagctaactcacattaattgcgttgcgctcactgcccgctttccagtcgggaaacctgtcgtgccagctgcattaatgaatcggccaacgcgcggggagaggcggtttgcgtattgggcgctcttccgcttcctcgctcactgactcgctgcgctcggtcgttcggctgcggcgagcggtatcagctcactcaaaggcggtaatacggttatccacagaatcaggggataacgcaggaaagaacatgtgagcaaaaggccagcaaaaggccaggaaccgtaaaaaggccgcgttgctggcgtttttccataggctccgcccccctgacgagcatcacaaaaatcgacgctcaagtcagaggtggcgaaacccgacaggactataaagataccaggcgtttccccctggaagctccctcgtgcgctctcctgttccgaccctgccgcttaccggatacctgtccgcctttctcccttcgggaagcgtggcgctttctcatagctcacgctgtaggtatctcagttcggtgtaggtcgttcgctccaagctgggctgtgtgcacgaaccccccgttcagcccgaccgctgcgccttatccggtaactatcgtcttgagtccaacccggtaagacacgacttatcgccactggcagcagccactggtaacaggattagcagagcgaggtatgtaggcggtgctacagagttcttgaagtggtggcctaactacggctacactagaagaacagtatttggtatctgcgctctgctgaagccagttaccttcggaaaaagagttggtagctcttgatccggcaaacaaaccaccgctggtagcggtggtttttttgtttgcaagcagcagattacgcgcagaaaaaaaggatctcaagaagatcctttgatcttttctacggggtctgacgctcagtggaacgaaaactcacgttaagggattttggtcatgagattatcaaaaaggatcttcacctagaaggtcctgtattagaggtcacgtgagtgttttgcgacattttgcgacaccatgtggtcacgctgggtatttaagcccgagtgagcacgcagggtctccattttgaagcgggaggtttgaacgcgcagccgccatccttttaaattaaaaatgaagttttaaatcaagcccaatctgaataatgttacaaccaattaaccaattctgattagaaaaactcatcgagcatcaaatgaaactgcaatttattcatatcaggattatcaataccatatttttgaaaaagccgtttctgtaatgaaggagaaaactcaccgaggcagttccataggatggcaagatcctggtatcggtctgcgattccgactcgtccaacatcaatacaacctattaatttcccctcgtcaaaaataaggttatcaagtgagaaatcaccatgagtgacgactgaatccggtgagaatggcaaaagtttatgcatttctttccagacttgttcaacaggccagccattacgctcgtcatcaaaatcactcgcatcaaccaaaccgttattcattcgtgattgcgcctgagcgagacgaaatacgcgatcgctgttaaaaggacaattacaaacaggaatcgaatgcaaccggcgcaggaacactgccagcgcatcaacaatattttcacctgaatcaggatattcttctaatacctggaatgctgtttttccggggatcgcagtggtgagtaaccatgcatcatcaggagtacggataaaatgcttgatggtcggaagaggcataaattccgtcagccagtttagtctgaccatctcatctgtaacatcattggcaacgctacctttgccatgtttcagaaacaactctggcgcatcgggcttcccatacaagcgatagattgtcgcacctgattgcccgacattatcgcgagcccatttatacccatataaatcagcatccatgttggaatttaatcgcggcctcgacgtttcccgttgaatatggctcataacaccccttgtattactgtttatgtaagcagacagttttattgttcatgatgatatatttttatcttgtgcaatgtaacatcagagattttgagacacgggccagagctgca

SEQ ID NO: 93 - DNA, 12582 bp, synthetic construct
  source 1..12582: mol_type = other DNA
tcgcgcgtttcggtgatgacggtgaaaacctctgacacatgcagctcccggagacggtcacagcttgtctgtaagcggatgccgggagcagacaagcccgtcagggcgcgtcagcgggtgttggcgggtgtcggggctggcttaactatgcggcatcagagcagattgtactgagagtgcaccatatgcggtgtgaaataccgcacagatgcgtaaggagaaaataccgcatcaggcgccattcgccattcaggctgcgcaactgttgggaagggcgatcggtgcgggcctcttcgctattacgccagctggcgaaagggggatgtgctgcaaggcgattaagttgggtaacgccagggttttcccagtcacgacgttgtaaaacgacggccagagaattccgcagggtctccattttgaagcgggaggtttgaacgcgcagccgccatgccggggttttacgagattgtgattaaggtccccagcgaccttgacgagcatctgcccggcatttctgacagctttgtgaactgggtggccgagaaggaatgggagttgccgccagattctgacatggatctgaatctgattgagcaggcacccctgaccgtggccgagaagctgcagcgcgactttctgacggaatggcgccgtgtgagtaaggccccggaggctcttttctttgtgcaatttgagaagggagagagctacttccacatgcacgtgctcgtggaaaccaccggggtgaaatccatggttttgggacgtttcctgagtcagattcgcgaaaaactgattcagagaatttaccgcgggatcgagccgactttgccaaactggttcgcggtcacaaagaccagaaatggcgccggaggcgggaacaaggtggtggatgagtgctacatccccaattacttgctccccaaaacccagcctgagctccagtgggcgtggactaatatggaacagtatttaagcgcctgtttgaatctcacggagcgtaaacggttggtggcgcagcatctgacgcacgtgtcgcagacgcaggagcagaacaaagagaatcagaatcccaattctgatgcgccggtgatcagatcaaaaacttcagccaggtacatggagctggtcgggtggctcgtggacaaggggattacctcggagaagcagtggatccaggaggaccaggcctcatacatctccttcaatgcggcctccaactcgcggtcccaaatcaaggctgccttggacaatgcgggaaagattatgagcctgactaaaaccgcccccgactacctggtgggccagcagcccgtggaggacatttccagcaatcggatttataaaattttggaactaaacgggtacgatccccaatatgcggcttccgtctttctgggatgggccacgaaaaagttcggcaagaggaacaccatctggctgtttgggcctgcaactaccgggaagaccaacatcgcggaggccatagcccacactgtgcccttctacgggtgcgtaaactggaccaatgagaactttcccttcaacgactgtgtcgacaagatggtgatctggtgggaggaggggaagatgaccgccaaggtcgtggagtcggccaaagccattctcggaggaagcaaggtgcgcgtggaccagaaatgcaagtcctcggcccagatagacccgactcccgtgatcgtcacctccaacaccaacatgtgcgccgtgattgacgggaactcaacgaccttcgaacaccagcagccgttgcaagaccggatgttcaaatttgaactcacccgccgtctggatcatgactttgggaaggtcaccaagcaggaagtcaaagactttttccggtgggcaaaggatcacgtggttgaggtggagcatgaattctacgtcaaaaagggtggagccaagaaaagacccgcccccagtgacgcagatataagtgagcccaaacgggtgcgcgagtcagttgcgcagccatcgacgtcagacgcggaagcttcgatcaactacgcagacaggtaccaaaacaaatgttctcgtcacgtgggcatgaatctgatgctgtttccctgcagacaatgcgagagaatgaatcagaattcaaatatctgcttcactcacggacagaaagactgtttagagtgctttcccgtgtcagaatctcaacccgtttctgtcgtcaaaaaggcgtatcagaaactgtgctacattcatcatatcatgggaaaggtgccagacgcttgcactgcctgcgatctggtcaatgtggatttggatgactgcatctttgaacaataaatgatttaaatcaggtatggctgccgatggttatcttccagattggctcgaggacaaccttagtgaaggaattcgcgagtggtgggctttgaaacctggagcccctcaacccaaggcaaatcaacaacatcaagacaacgctcgaggtcttgtgcttccgggttacaaataccttggacccggcaacggactcgacaagggggagccggtcaacgcagcagacgcggcggccctcgagcacgacaaggcctacgaccagcagctcaaggccggagacaacccgtacctcaagtacaaccacgccgacgccgagttccaggagcggctcaaagaagatacgtcttttgggggcaacctcgggcgagcagtcttccaggccaaaaagaggcttcttgaacctcttggtctggttgaggaagcggctaagacggctcctggaaagaagaggcctgtagagcagtctcctcaggaaccggactcctccgcgggtattggcaaatcgggtgcacagcccgctaaaaagagactcaatttcggtcagactggcgacacagagtcagtcccagaccctcaaccaatcggagaacctcccgcagccccctcaggtgtgggatctcttacaatggcttcaggtggtggcgcaccagtggcagacaataacgaaggtgccgatggagtgggtagttcctcgggaaattggcattgcgattcccaatggctgggggacagagtcatcaccaccagcacccgaacctgggccctgcccacctacaacaatcacctctacaagcaaatctccaacagcacatctggaggatcttcaaatgacaacgcctacttcggctacagcaccccctgggggtattttgacttcaacagattccactgccacttctcaccacgtgactggcagcgactcatcaacaacaactggggattccggcctaagcgactcaacttcaagctcttcaacattcaggtcaaagaggttacggacaacaatggagtcaagaccatcgccaataaccttaccagcacggtccaggtcttcacggactcagactatcagctcccgtacgtgctcgggtcggctcacgagggctgcctcccgccgttcccagcggacgttttcatgattcctcagtacgggtatctgacgcttaatgatggaagccaggccgtgggtcgttcgtccttttactgcctggaatatttcccgtcgcaaatgctaagaacgggtaacaacttccagttcagctacgagtttgagaacgtacctttccatagcagctacgctcacagccaaagcctggaccgactaatgaatccactcatcgaccaatacttgtactatctctcaaagactattaacggttctggacagaatcaacaaacgctaaaattcagtgtggccggacccagcaacatggctgtccagggaagaaactacatacctggacccagctaccgacaacaacgtgtctcaaccactgtgactcaaaacaacaacagcgaatttgcttggcctggagcttcttcttgggctctcaatggacgtaatagcttgatgaatcctggacctgctatggccagccacaaagaaggagaggaccgtttctttcctttgtctggatctttaatttttggcaaacaaggaactggaagagacaacgtggatgcggacaaagtcatgataaccaacgaagaagaaattaaaactactaacccggtagcaacggagtcctatggacaagtggccacaaaccaccagagtgcccaagcacaggcgcagaccggctgggttcaaaaccaaggaatacttccgggtatggtttggcaggacagagatgtgtacctgcaaggacccatttgggccaaaattcctcacacggacggcaactttcacccttctccgctgatgggagggtttggaatgaagcacccgcctcctcagatcctcatcaaaaacacacctgtacctgcggatcctccaacggccttcaacaaggacaagctgaactctttcatcacccagtattctactggccaagtcagcgtggagatcgagtgggagctgcagaaggaaaacagcaagcgctggaacccggagatccagtacacttccaactattacaagtctaataatgttgaatttgctgttaatactgaaggtgtatatagtgaaccccgccccattggcaccagatacctgactcgtaatctgtaattgcctgttaatcaataaaccggttgattcgtttcagttgaactttggtctctgcgaagggcgaattcgtttaaacctgcaggactagagccgaattctgcatcgcgatagggataacagggtaataaataatgtactagagacactttcaataaaggcaaatgcttttatttgtacactctcgggtgattatttacccccacccttgccgtctgcgccgttcagaagtcgaaggggttctgtctggcatcggaatgggccacgggcagagacacgttccggtactggtgcttggtggaccacttgaactcaggcacgaccattctaggcagctctgtgaagttctcgctccacaggctccgcaccatcaccagggcgttcagcaggtcaggggcgctgattttgaagtcgcagttaggtccgccgccctgggctctgctgtttctgtacacagggttgcagcactggaacacaataagagcagggtggtgcacgctggccagcacagacttgtcgctgatcaggtcggcgtcgagatcctcggcgttagacaaggcaaaaggggtcagcttgggcagctggcggcccaggaaaggggcgtggccgggcttgctattgcactcgcatctcagaggcatcagcaggtggccgtggccggtctgggcgttggggtacagggcctgcataaaggccttgatctgtttgaaggccacttgggccttggcgccttcggagaagaacatgccgcagcttttgccgctgaactggttggcggggcaggcggcgtcgtgcacacaacaccgggcgtcggtattgctgatctgcaccacgtttctgccccatctgttcttcacgatcttggccttgctgctctgctctttcagggccctctggccgttctcagaggtgacgtccatctcgatcacatgttccttgttgatcatgatgctgccgtgcagacacttcagctcgccctcgatttccgcgcatctgtgcagccacagggcacaaccggtaggctcgtggtgcttgtatgtcacctcagcaaaagattgcaggtaggcttgcaggaatctgcccatcatggtcacgaaggtcttgttggaggtaaaagtcagctgcagtcctctgtgttcctcgttcagccatgtcttgcacacggcggccagagcctcgacctgatctggcagcagcttgaaattagccttcaggtcgttgtccacgtgatacttatccatcagtgctctggcggcttccatgcccttctcccaggcggaaacgatgggcacgctcagggggttcatcacggtgatctcgctttcagcttctgaaggttcctcctcttcctcctgtgttctcatgccccgagccacggggtcgtcctcattcagtctccgcacggttctttttcctccctttccgtgcttaatcagtacaggaggattagagaagcccaccatctggagggcgacgtcctccctttcttcttcgctatccacgatcacttctgggctggggggccgttcaggctttgggctaggccgtttttttttcttcttaggggcgatagccagatcagcggcgcttgtagagggccgaggactaggggttctaggcacgagggcgtcctggctgctgtcctcctcatcctcgctctcgatccgtctccgcattctcttcttagggggggcccgcggagggggagggctagggctaggggacgacacatcttccatggttggaggtctgcgagcagcgcctctgcctctctctggtgttgtctcgcgctgttcttcctctctagaggccatttccttctcctataggcagaaaaagatcgttgaaactcactccggggctgtggacgtcggcttaccttcgcaaatttgtacctgaggactaccacgcccacgagattaggttctacgaagaccaatcccgcccgcctaatgcggagcttaccgcctgcgtcattacccagggccacattcttggccaattgcaagccatcaacaaagcccgccaagagtttctgctacgaaagggacggggggtttacttggacccccagtccggcgaggagctcaacccaatccccccgccgccgcagccctatcagcagcagccgcgggcccttgcttcccaggatggcacccaaaaagaagctgcagctgccgccgccacccacggacgaggaggaatactgggacagtcaggcagaggaggttttggacgaggaggaggaggacatgatggaagactgggagagcctagacgaggaagcttccgaggtcgaagaggtgtcagacgaaacaccgtcaccctcggtcgcattcccctcgccggcgccccagaaatcggcaaccggttccagcatggctacaacctccgctcctcaggcgccgccggcactgcccgttcgccgacccaaccgtagatgggacaccactggaaccagggccggtaagtccaagcagccgccgccgttagcccaagagcaacaacagcgccaaggctaccgctcatggcgcgggcacaagaacgccatagttgcttgcttgcaagactgtgggggcaacatctccttcgcccgccgctttcttctctaccatcacggcgtggccttcccccgtaacatcctgcattactaccgtcatctctacagcccatactgcaccggcggcagcggcagcaacagcagcggccacacagaagcaaaggcgaccggatagcaagactctgacaaagcccaagaaatccacagcggcggcagcagcaggaggaggagcgctgcgtctggcgcccaacgaacccgtatcgacccgcgagcttagaaacaggatttttcccactctgtatgctatatttcaacagagcaggggccaagaacaagagctgaaaataaaaaacaggtctctgcgatccctcacccgcagctgcctgtatcacaaaagcgaagatcagcttcggcgcacgctggaagacgcggaggctctcttcagtaaatactgcgcgctgactcttaaggactagtttcgcgccctttctcaaatttaagcgcgaaaactacgtcatctccagcggccacacccggcgccagcacctgttgtcagcgccattttttagggcggagtaacttgtatgtgttgggaattgtagttttcttaaaatgggaagtgacgtaacgtgggaaaacggaagtgacgatttgaggaagttgtgggttttttggctttcgtttctgggcgtaggttcgcgtgcggttttctgggtgttttttgtggactttaaccgttacgtcattttttagtcctatatatactcgctctgcacttggcccttttttacactgtgactgattgagctggtgccgtgtcgagtggtgtttttttaataggttttcttttttactggtaaggctgactgttatgactacgtccggcgttccatttggcatgacactacgaccaacacgatctcggttgtctcggcgcactccgtacagtagggatcgtctacctccttttgagacagaaacccgcgctaccatactggaggatcatccgctgctgcccgaatgtaacactttgacaatgcacaacgtgagttacgtgcgaggtcttccctgcagtgtgggatttacgctgattcaggaatgggttgttccctgggatatggttctaacgcgggaggagcttgtaatcctgaggaagtgtatgcacgtgtgcctgtgttgtgccaacattgatatcatgacgagcatgatgatccatggttacgagtcctgggctctccactgtcattgttccagtcccggttccctgcagtgtatagccggcgggcaggttttggccagctggtttaggatggtggtggatggcgccatgtttaatcagaggtttatatggtaccgggaggtggtgaattacaacatgccaaaagaggtaatgtttatgtccagcgtgtttatgaggggtcgccacttaatctacctgcgcttgtggtatgatggccacgtgggttctgtggtccccgccatgagctttggatacagcgccttgcactgtgggattttgaacaatattgtggtgctgtgctgcagttactgtgctgatttaagtgagatcagggtgcgctgctgtgcccggaggacaaggcgccttatgctgcgggcggtgcgaatcatcgctgaggagaccactgccatgttgtattcctgcaggacggagcggcggcggcagcagtttattcgcgcgctgctgcagcaccaccgccctatcctgatgcacgattatgactctacccccatgtaggcgtggacttctccttcgccgcccgttaagcaaccgcaagttggacagcagcctgtggctcagcagctggacagcgacatgaacttaagtgagctgcccggggagtttattaatatcactgatgagcgtttggctcgacaggaaaccgtgtggaatataacacctaagaatatgtctgttacccatgatatgatgctttttaaggccagccggggagaaaggactgtgtactctgtgtgttgggagggaggtggcaggttgaatactagggttctgtgagtttgattaaggtacggtgatctgtataagctatgtggtggtggggctatactactgaatgaaaaatgacttgaaattttctgcaattgaaaaataaacacgttgaaacataacacaaacgattctttattcttgggcaatgtatgaaaaagtgtaagaggatgtggcaaatatttcattaatgtagttgtggccagaccagtcccatgaaaatgacatagagtatgcacttggagttgtgtctcctgtttcctgtgtaccgtttagtgtaatggttagtgttacaggtttagttttgtctccgtttaagtaaacttgactgacaatgttacttttggcagttttaccgtgagattttggataagctgataggttaggcataaatccaacagcgtttgtataggctgtcgcccctcctgacgcggtaggaggaggggagggtgccctgcatgtctgccgctgctcttgctcttgccgctgctgaggaggggggcgcatctgccgcagcaccggatgcatctgggaaaagcaaaaaaggggctcgtccctgtttccggaggaatttgcaagcggggtcttgcatgacggggaggcaaacccccgttcgccgcagtccggccggtccgagactcgaaccgggggtcccgcgactcaacccttggaaaataaccctccggctacagggagcgagccacttaatgctttcgctttccagcctaaccgcttacgctgcgcgcggccagtggccaaaaaagctagcgcagcagccgccgcgcctggaaggaagccaaaaggagcactcccccgttgtctgacgtcgcacacctgggttcgacacgcgggcggtaaccgcatggatcacggcggacggccggatacggggctcgaaccccggtcgtccgccatgatacccttgcgaatttatccaccagaccacggaagagtgcccgcttacaggctctccttttgcacggtctagagcgtcaacgattgcgcgcgcctgaccggccagagcgtcccgaccatggagcactttttgccgctgcgcaacatctggaaccgcgtccgcgactttccgcgcgcctccaccaccgccgccggcatcacctggatgtccaggtacatctacggatatggcaaacagctattatgggtattatgggtgcggccgcggatcccgggcccgtcgactgcagaggcctgcatgcaagcttggtgtaatcatggtcatagctgtttcctgtgtgaaattgttatccgctcacaattccacacaacatacgagccggaagcataaagtgtaaagcctggggtgcctaatgagtgagctaactcacattaattgcgttgcgctcactgcccgctttccagtcgggaaacctgtcgtgccagctgcattaatgaatcggccaacgcgcggggagaggcggtttgcgtattgggcgctcttccgcttcctcgctcactgactcgctgcgctcggtcgttcggctgcggcgagcggtatcagctcactcaaaggcggtaatacggttatccacagaatcaggggataacgcaggaaagaacatgtgagcaaaaggccagcaaaaggccaggaaccgtaaaaaggccgcgttgctggcgtttttccataggctccgcccccctgacgagcatcacaaaaatcgacgctcaagtcagaggtggcgaaacccgacaggactataaagataccaggcgtttccccctggaagctccctcgtgcgctctcctgttccgaccctgccgcttaccggatacctgtccgcctttctcccttcgggaagcgtggcgctttctcatagctcacgctgtaggtatctcagttcggtgtaggtcgttcgctccaagctgggctgtgtgcacgaaccccccgttcagcccgaccgctgcgccttatccggtaactatcgtcttgagtccaacccggtaagacacgacttatcgccactggcagcagccactggtaacaggattagcagagcgaggtatgtaggcggtgctacagagttcttgaagtggtggcctaactacggctacactagaagaacagtatttggtatctgcgctctgctgaagccagttaccttcggaaaaagagttggtagctcttgatccggcaaacaaaccaccgctggtagcggtggtttttttgtttgcaagcagcagattacgcgcagaaaaaaaggatctcaagaagatcctttgatcttttctacggggtctgacgctcagtggaacgaaaactcacgttaagggattttggtcatgagattatcaaaaaggatcttcacctagaaggtcctgtattagaggtcacgtgagtgttttgcgacattttgcgacaccatgtggtcacgctgggtatttaagcccgagtgagcacgcagggtctccattttgaagcgggaggtttgaacgcgcagccgccatccttttaaattaaaaatgaagttttaaatcaagcccaatctgaataatgttacaaccaattaaccaattctgattagaaaaactcatcgagcatcaaatgaaactgcaatttattcatatcaggattatcaataccatatttttgaaaaagccgtttctgtaatgaaggagaaaactcaccgaggcagttccataggatggcaagatcctggtatcggtctgcgattccgactcgtccaacatcaatacaacctattaatttcccctcgtcaaaaataaggttatcaagtgagaaatcaccatgagtgacgactgaatccggtgagaatggcaaaagtttatgcatttctttccagacttgttcaacaggccagccattacgctcgtcatcaaaatcactcgcatcaaccaaaccgttattcattcgtgattgcgcctgagcgagacgaaatacgcgatcgctgttaaaaggacaattacaaacaggaatcgaatgcaaccggcgcaggaacactgccagcgcatcaacaatattttcacctgaatcaggatattcttctaatacctggaatgctgtttttccggggatcgcagtggtgagtaaccatgcatcatcaggagtacggataaaatgcttgatggtcggaagaggcataaattccgtcagccagtttagtctgaccatctcatctgtaacatcattggcaacgctacctttgccatgtttcagaaacaactctggcgcatcgggcttcccatacaagcgatagattgtcgcacctgattgcccgacattatcgcgagcccatttatacccatataaatcagcatccatgttggaatttaatcgcggcctcgacgtttcccgttgaatatggctcataacaccccttgtattactgtttatgtaagcagacagttttattgttcatgatgatatatttttatcttgtgcaatgtaacatcagagattttgagacacgggccagagctgca

SEQ ID NO: 94 - DNA, 12579 bp, synthetic construct
  source 1..12579: mol_type = other DNA
tcgcgcgtttcggtgatgacggtgaaaacctctgacacatgcagctcccggagacggtcacagcttgtctgtaagcggatgccgggagcagacaagcccgtcagggcgcgtcagcgggtgttggcgggtgtcggggctggcttaactatgcggcatcagagcagattgtactgagagtgcaccatatgcggtgtgaaataccgcacagatgcgtaaggagaaaataccgcatcaggcgccattcgccattcaggctgcgcaactgttgggaagggcgatcggtgcgggcctcttcgctattacgccagctggcgaaagggggatgtgctgcaaggcgattaagttgggtaacgccagggttttcccagtcacgacgttgtaaaacgacggccagagaattccgcagggtctccattttgaagcgggaggtttgaacgcgcagccgccatgccggggttttacgagattgtgattaaggtccccagcgaccttgacgagcatctgcccggcatttctgacagctttgtgaactgggtggccgagaaggaatgggagttgccgccagattctgacatggatctgaatctgattgagcaggcacccctgaccgtggccgagaagctgcagcgcgactttctgacggaatggcgccgtgtgagtaaggccccggaggctcttttctttgtgcaatttgagaagggagagagctacttccacatgcacgtgctcgtggaaaccaccggggtgaaatccatggttttgggacgtttcctgagtcagattcgcgaaaaactgattcagagaatttaccgcgggatcgagccgactttgccaaactggttcgcggtcacaaagaccagaaatggcgccggaggcgggaacaaggtggtggatgagtgctacatccccaattacttgctccccaaaacccagcctgagctccagtgggcgtggactaatatggaacagtatttaagcgcctgtttgaatctcacggagcgtaaacggttggtggcgcagcatctgacgcacgtgtcgcagacgcaggagcagaacaaagagaatcagaatcccaattctgatgcgccggtgatcagatcaaaaacttcagccaggtacatggagctggtcgggtggctcgtggacaaggggattacctcggagaagcagtggatccaggaggaccaggcctcatacatctccttcaatgcggcctccaactcgcggtcccaaatcaaggctgccttggacaatgcgggaaagattatgagcctgactaaaaccgcccccgactacctggtgggccagcagcccgtggaggacatttccagcaatcggatttataaaattttggaactaaacgggtacgatccccaatatgcggcttccgtctttctgggatgggccacgaaaaagttcggcaagaggaacaccatctggctgtttgggcctgcaactaccgggaagaccaacatcgcggaggccatagcccacactgtgcccttctacgggtgcgtaaactggaccaatgagaactttcccttcaacgactgtgtcgacaagatggtgatctggtgggaggaggggaagatgaccgccaaggtcgtggagtcggccaaagccattctcggaggaagcaaggtgcgcgtggaccagaaatgcaagtcctcggcccagatagacccgactcccgtgatcgtcacctccaacaccaacatgtgcgccgtgattgacgggaactcaacgaccttcgaacaccagcagccgttgcaagaccggatgttcaaatttgaactcacccgccgtctggatcatgactttgggaaggtcaccaagcaggaagtcaaagactttttccggtgggcaaaggatcacgtggttgaggtggagcatgaattctacgtcaaaaagggtggagccaagaaaagacccgcccccagtgacgcagatataagtgagcccaaacgggtgcgcgagtcagttgcgcagccatcgacgtcagacgcggaagcttcgatcaactacgcagacaggtaccaaaacaaatgttctcgtcacgtgggcatgaatctgatgctgtttccctgcagacaatgcgagagaatgaatcagaattcaaatatctgcttcactcacggacagaaagactgtttagagtgctttcccgtgtcagaatctcaacccgtttctgtcgtcaaaaaggcgtatcagaaactgtgctacattcatcatatcatgggaaaggtgccagacgcttgcactgcctgcgatctggtcaatgtggatttggatgactgcatctttgaacaataaatgatttaaatcaggtatggctgccgatggttatcttccagattggctcgaggacactctctctgaaggaataagacagtggtggaagctcaaacctggcccaccaccaccaaagcccgcagagcggcataaggacgacagcaggggtcttgtgcttcctgggtacaagtacctcggacccttcaacggactcgacaagggagagccggtcaacgaggcagacgccgcggccctcgagcacgacaaagcctacgaccggcagctcgacagcggagacaacccgtacctcaagtacaaccacgccgacgcggagtttcaggagcgccttaaagaagatacgtcttttgggggcaacctcggacgagcagtcttccaggcgaaaaagagggttcttgaacctctgggcctggttgaggaacctgttaagacggctccgggaaaaaagaggccggtagagcactctcctgtggagccagactcctcctcgggaaccggaaaggcgggccagcagcctgcaagaaaaagattgaattttggtcagactggagacgcagactcagtacctgacccccagcctctcggacagccaccagcagccccctctggtctgggaactaatacgatggctacaggcagtggcgcaccaatggcagacaataacgagggcgccgacggagtgggtaattcctcgggaaattggcattgcgattccacatggatgggcgacagagtcatcaccaccagcacccgaacctgggccctgcccacctacaacaaccacctctacaaacaaatttccagccaatcaggagcctcgaacgacaatcactactttggctacagcaccccttgggggtattttgacttcaacagattccactgccacttttcaccacgtgactggcaaagactcatcaacaacaactggggattccgacccaagagactcaacttcaagctctttaacattcaagtcaaagaggtcacgcagaatgacggtacgacgacgattgccaataaccttaccagcacggttcaggtgtttactgactcggagtaccagctcccgtacgtcctcggctcggcgcatcaaggatgcctcccgccgttcccagcagacgtcttcatggtgccacagtatggatacctcaccctgaacaacgggagtcaggcagtaggacgctcttcattttactgcctggagtactttccttctcagatgctgcgtaccggaaacaactttaccttcagctacacttttgaggacgttcctttccacagcagctacgctcacagccagagtctggaccgtctcatgaatcctctcatcgaccagtacctgtattacttgagcagaacaaacactccaagtggaaccaccacgcagtcaaggcttcagttttctcaggccggagcgagtgacattcgggaccagtctaggaactggcttcctggaccctgttaccgccagcagcgagtatcaaagacatctgcggataacaacaacagtgaatactcgtggactggagctaccaagtaccacctcaatggcagagactctctggtgaatccgggcccggccatggcaagccacaaggacgatgaagaaaagttttttcctcagagcggggttctcatctttgggaagcaaggctcagagaaaacaaatgtggacattgaaaaggtcatgattacagacgaagaggaaatcaggacaaccaatcccgtggctacggagcagtatggttctgtatctaccaacctccagagaggcaacagacaagcagctaccgcagatgtcaacacacaaggcgttcttccaggcatggtctggcaggacagagatgtgtaccttcaggggcccatctgggcaaagattccacacacggacggacattttcacccctctcccctcatgggtggattcggacttaaacaccctcctccacagattctcatcaagaacaccccggtacctgcgaatccttcgaccaccttcagtgcggcaaagtttgcttccttcatcacacagtactccacgggacaggtcagcgtggagatcgagtgggagctgcagaaggaaaacagcaaacgctggaatcccgaaattcagtacacttccaactacaacaagtctgttaatgtggactttactgtggacactaatggcgtgtattcagagcctcgccccattggcaccagatacctgactcgtaatctgtaattgcctgttaatcaataaaccggttgattcgtttcagttgaactttggtctctgcgaagggcgaattcgtttaaacctgcaggactagagccgaattctgcatcgcgatagggataacagggtaataaataatgtactagagacactttcaataaaggcaaatgcttttatttgtacactctcgggtgattatttacccccacccttgccgtctgcgccgttcagaagtcgaaggggttctgtctggcatcggaatgggccacgggcagagacacgttccggtactggtgcttggtggaccacttgaactcaggcacgaccattctaggcagctctgtgaagttctcgctccacaggctccgcaccatcaccagggcgttcagcaggtcaggggcgctgattttgaagtcgcagttaggtccgccgccctgggctctgctgtttctgtacacagggttgcagcactggaacacaataagagcagggtggtgcacgctggccagcacagacttgtcgctgatcaggtcggcgtcgagatcctcggcgttagacaaggcaaaaggggtcagcttgggcagctggcggcccaggaaaggggcgtggccgggcttgctattgcactcgcatctcagaggcatcagcaggtggccgtggccggtctgggcgttggggtacagggcctgcataaaggccttgatctgtttgaaggccacttgggccttggcgccttcggagaagaacatgccgcagcttttgccgctgaactggttggcggggcaggcggcgtcgtgcacacaacaccgggcgtcggtattgctgatctgcaccacgtttctgccccatctgttcttcacgatcttggccttgctgctctgctctttcagggccctctggccgttctcagaggtgacgtccatctcgatcacatgttccttgttgatcatgatgctgccgtgcagacacttcagctcgccctcgatttccgcgcatctgtgcagccacagggcacaaccggtaggctcgtggtgcttgtatgtcacctcagcaaaagattgcaggtaggcttgcaggaatctgcccatcatggtcacgaaggtcttgttggaggtaaaagtcagctgcagtcctctgtgttcctcgttcagccatgtcttgcacacggcggccagagcctcgacctgatctggcagcagcttgaaattagccttcaggtcgttgtccacgtgatacttatccatcagtgctctggcggcttccatgcccttctcccaggcggaaacgatgggcacgctcagggggttcatcacggtgatctcgctttcagcttctgaaggttcctcctcttcctcctgtgttctcatgccccgagccacggggtcgtcctcattcagtctccgcacggttctttttcctccctttccgtgcttaatcagtacaggaggattagagaagcccaccatctggagggcgacgtcctccctttcttcttcgctatccacgatcacttctgggctggggggccgttcaggctttgggctaggccgtttttttttcttcttaggggcgatagccagatcagcggcgcttgtagagggccgaggactaggggttctaggcacgagggcgtcctggctgctgtcctcctcatcctcgctctcgatccgtctccgcattctcttcttagggggggcccgcggagggggagggctagggctaggggacgacacatcttccatggttggaggtctgcgagcagcgcctctgcctctctctggtgttgtctcgcgctgttcttcctctctagaggccatttccttctcctataggcagaaaaagatcgttgaaactcactccggggctgtggacgtcggcttaccttcgcaaatttgtacctgaggactaccacgcccacgagattaggttctacgaagaccaatcccgcccgcctaatgcggagcttaccgcctgcgtcattacccagggccacattcttggccaattgcaagccatcaacaaagcccgccaagagtttctgctacgaaagggacggggggtttacttggacccccagtccggcgaggagctcaacccaatccccccgccgccgcagccctatcagcagcagccgcgggcccttgcttcccaggatggcacccaaaaagaagctgcagctgccgccgccacccacggacgaggaggaatactgggacagtcaggcagaggaggttttggacgaggaggaggaggacatgatggaagactgggagagcctagacgaggaagcttccgaggtcgaagaggtgtcagacgaaacaccgtcaccctcggtcgcattcccctcgccggcgccccagaaatcggcaaccggttccagcatggctacaacctccgctcctcaggcgccgccggcactgcccgttcgccgacccaaccgtagatgggacaccactggaaccagggccggtaagtccaagcagccgccgccgttagcccaagagcaacaacagcgccaaggctaccgctcatggcgcgggcacaagaacgccatagttgcttgcttgcaagactgtgggggcaacatctccttcgcccgccgctttcttctctaccatcacggcgtggccttcccccgtaacatcctgcattactaccgtcatctctacagcccatactgcaccggcggcagcggcagcaacagcagcggccacacagaagcaaaggcgaccggatagcaagactctgacaaagcccaagaaatccacagcggcggcagcagcaggaggaggagcgctgcgtctggcgcccaacgaacccgtatcgacccgcgagcttagaaacaggatttttcccactctgtatgctatatttcaacagagcaggggccaagaacaagagctgaaaataaaaaacaggtctctgcgatccctcacccgcagctgcctgtatcacaaaagcgaagatcagcttcggcgcacgctggaagacgcggaggctctcttcagtaaatactgcgcgctgactcttaaggactagtttcgcgccctttctcaaatttaagcgcgaaaactacgtcatctccagcggccacacccggcgccagcacctgttgtcagcgccattttttagggcggagtaacttgtatgtgttgggaattgtagttttcttaaaatgggaagtgacgtaacgtgggaaaacggaagtgacgatttgaggaagttgtgggttttttggctttcgtttctgggcgtaggttcgcgtgcggttttctgggtgttttttgtggactttaaccgttacgtcattttttagtcctatatatactcgctctgcacttggcccttttttacactgtgactgattgagctggtgccgtgtcgagtggtgtttttttaataggttttcttttttactggtaaggctgactgttatgactacgtccggcgttccatttggcatgacactacgaccaacacgatctcggttgtctcggcgcactccgtacagtagggatcgtctacctccttttgagacagaaacccgcgctaccatactggaggatcatccgctgctgcccgaatgtaacactttgacaatgcacaacgtgagttacgtgcgaggtcttccctgcagtgtgggatttacgctgattcaggaatgggttgttccctgggatatggttctaacgcgggaggagcttgtaatcctgaggaagtgtatgcacgtgtgcctgtgttgtgccaacattgatatcatgacgagcatgatgatccatggttacgagtcctgggctctccactgtcattgttccagtcccggttccctgcagtgtatagccggcgggcaggttttggccagctggtttaggatggtggtggatggcgccatgtttaatcagaggtttatatggtaccgggaggtggtgaattacaacatgccaaaagaggtaatgtttatgtccagcgtgtttatgaggggtcgccacttaatctacctgcgcttgtggtatgatggccacgtgggttctgtggtccccgccatgagctttggatacagcgccttgcactgtgggattttgaacaatattgtggtgctgtgctgcagttactgtgctgatttaagtgagatcagggtgcgctgctgtgcccggaggacaaggcgccttatgctgcgggcggtgcgaatcatcgctgaggagaccactgccatgttgtattcctgcaggacggagcggcggcggcagcagtttattcgcgcgctgctgcagcaccaccgccctatcctgatgcacgattatgactctacccccatgtaggcgtggacttctccttcgccgcccgttaagcaaccgcaagttggacagcagcctgtggctcagcagctggacagcgacatgaacttaagtgagctgcccggggagtttattaatatcactgatgagcgtttggctcgacaggaaaccgtgtggaatataacacctaagaatatgtctgttacccatgatatgatgctttttaaggccagccggggagaaaggactgtgtactctgtgtgttgggagggaggtggcaggttgaatactagggttctgtgagtttgattaaggtacggtgatctgtataagctatgtggtggtggggctatactactgaatgaaaaatgacttgaaattttctgcaattgaaaaataaacacgttgaaacataacacaaacgattctttattcttgggcaatgtatgaaaaagtgtaagaggatgtggcaaatatttcattaatgtagttgtggccagaccagtcccatgaaaatgacatagagtatgcacttggagttgtgtctcctgtttcctgtgtaccgtttagtgtaatggttagtgttacaggtttagttttgtctccgtttaagtaaacttgactgacaatgttacttttggcagttttaccgtgagattttggataagctgataggttaggcataaatccaacagcgtttgtataggctgtcgcccctcctgacgcggtaggaggaggggagggtgccctgcatgtctgccgctgctcttgctcttgccgctgctgaggaggggggcgcatctgccgcagcaccggatgcatctgggaaaagcaaaaaaggggctcgtccctgtttccggaggaatttgcaagcggggtcttgcatgacggggaggcaaacccccgttcgccgcagtccggccggtccgagactcgaaccgggggtcccgcgactcaacccttggaaaataaccctccggctacagggagcgagccacttaatgctttcgctttccagcctaaccgcttacgctgcgcgcggccagtggccaaaaaagctagcgcagcagccgccgcgcctggaaggaagccaaaaggagcactcccccgttgtctgacgtcgcacacctgggttcgacacgcgggcggtaaccgcatggatcacggcggacggccggatacggggctcgaaccccggtcgtccgccatgatacccttgcgaatttatccaccagaccacggaagagtgcccgcttacaggctctccttttgcacggtctagagcgtcaacgattgcgcgcgcctgaccggccagagcgtcccgaccatggagcactttttgccgctgcgcaacatctggaaccgcgtccgcgactttccgcgcgcctccaccaccgccgccggcatcacctggatgtccaggtacatctacggatatggcaaacagctattatgggtattatgggtgcggccgcggatcccgggcccgtcgactgcagaggcctgcatgcaagcttggtgtaatcatggtcatagctgtttcctgtgtgaaattgttatccgctcacaattccacacaacatacgagccggaagcataaagtgtaaagcctggggtgcctaatgagtgagctaactcacattaattgcgttgcgctcactgcccgctttccagtcgggaaacctgtcgtgccagctgcattaatgaatcggccaacgcgcggggagaggcggtttgcgtattgggcgctcttccgcttcctcgctcactgactcgctgcgctcggtcgttcggctgcggcgagcggtatcagctcactcaaaggcggtaatacggttatccacagaatcaggggataacgcaggaaagaacatgtgagcaaaaggccagcaaaaggccaggaaccgtaaaaaggccgcgttgctggcgtttttccataggctccgcccccctgacgagcatcacaaaaatcgacgctcaagtcagaggtggcgaaacccgacaggactataaagataccaggcgtttccccctggaagctccctcgtgcgctctcctgttccgaccctgccgcttaccggatacctgtccgcctttctcccttcgggaagcgtggcgctttctcatagctcacgctgtaggtatctcagttcggtgtaggtcgttcgctccaagctgggctgtgtgcacgaaccccccgttcagcccgaccgctgcgccttatccggtaactatcgtcttgagtccaacccggtaagacacgacttatcgccactggcagcagccactggtaacaggattagcagagcgaggtatgtaggcggtgctacagagttcttgaagtggtggcctaactacggctacactagaagaacagtatttggtatctgcgctctgctgaagccagttaccttcggaaaaagagttggtagctcttgatccggcaaacaaaccaccgctggtagcggtggtttttttgtttgcaagcagcagattacgcgcagaaaaaaaggatctcaagaagatcctttgatcttttctacggggtctgacgctcagtggaacgaaaactcacgttaagggattttggtcatgagattatcaaaaaggatcttcacctagaaggtcctgtattagaggtcacgtgagtgttttgcgacattttgcgacaccatgtggtcacgctgggtatttaagcccgagtgagcacgcagggtctccattttgaagcgggaggtttgaacgcgcagccgccatccttttaaattaaaaatgaagttttaaatcaagcccaatctgaataatgttacaaccaattaaccaattctgattagaaaaactcatcgagcatcaaatgaaactgcaatttattcatatcaggattatcaataccatatttttgaaaaagccgtttctgtaatgaaggagaaaactcaccgaggcagttccataggatggcaagatcctggtatcggtctgcgattccgactcgtccaacatcaatacaacctattaatttcccctcgtcaaaaataaggttatcaagtgagaaatcaccatgagtgacgactgaatccggtgagaatggcaaaagtttatgcatttctttccagacttgttcaacaggccagccattacgctcgtcatcaaaatcactcgcatcaaccaaaccgttattcattcgtgattgcgcctgagcgagacgaaatacgcgatcgctgttaaaaggacaattacaaacaggaatcgaatgcaaccggcgcaggaacactgccagcgcatcaacaatattttcacctgaatcaggatattcttctaatacctggaatgctgtttttccggggatcgcagtggtgagtaaccatgcatcatcaggagtacggataaaatgcttgatggtcggaagaggcataaattccgtcagccagtttagtctgaccatctcatctgtaacatcattggcaacgctacctttgccatgtttcagaaacaactctggcgcatcgggcttcccatacaagcgatagattgtcgcacctgattgcccgacattatcgcgagcccatttatacccatataaatcagcatccatgttggaatttaatcgcggcctcgacgtttcccgttgaatatggctcataacaccccttgtattactgtttatgtaagcagacagttttattgttcatgatgatatatttttatcttgtgcaatgtaacatcagagattttgagacacgggccagagctgca

SEQ ID NO: 95 - DNA, 12582 bp, synthetic construct
  source 1..12582: mol_type = other DNA
tcgcgcgtttcggtgatgacggtgaaaacctctgacacatgcagctcccggagacggtcacagcttgtctgtaagcggatgccgggagcagacaagcccgtcagggcgcgtcagcgggtgttggcgggtgtcggggctggcttaactatgcggcatcagagcagattgtactgagagtgcaccatatgcggtgtgaaataccgcacagatgcgtaaggagaaaataccgcatcaggcgccattcgccattcaggctgcgcaactgttgggaagggcgatcggtgcgggcctcttcgctattacgccagctggcgaaagggggatgtgctgcaaggcgattaagttgggtaacgccagggttttcccagtcacgacgttgtaaaacgacggccagagaattccgcagggtctccattttgaagcgggaggtttgaacgcgcagccgccatgccggggttttacgagattgtgattaaggtccccagcgaccttgacgagcatctgcccggcatttctgacagctttgtgaactgggtggccgagaaggaatgggagttgccgccagattctgacatggatctgaatctgattgagcaggcacccctgaccgtggccgagaagctgcagcgcgactttctgacggaatggcgccgtgtgagtaaggccccggaggctcttttctttgtgcaatttgagaagggagagagctacttccacatgcacgtgctcgtggaaaccaccggggtgaaatccatggttttgggacgtttcctgagtcagattcgcgaaaaactgattcagagaatttaccgcgggatcgagccgactttgccaaactggttcgcggtcacaaagaccagaaatggcgccggaggcgggaacaaggtggtggatgagtgctacatccccaattacttgctccccaaaacccagcctgagctccagtgggcgtggactaatatggaacagtatttaagcgcctgtttgaatctcacggagcgtaaacggttggtggcgcagcatctgacgcacgtgtcgcagacgcaggagcagaacaaagagaatcagaatcccaattctgatgcgccggtgatcagatcaaaaacttcagccaggtacatggagctggtcgggtggctcgtggacaaggggattacctcggagaagcagtggatccaggaggaccaggcctcatacatctccttcaatgcggcctccaactcgcggtcccaaatcaaggctgccttggacaatgcgggaaagattatgagcctgactaaaaccgcccccgactacctggtgggccagcagcccgtggaggacatttccagcaatcggatttataaaattttggaactaaacgggtacgatccccaatatgcggcttccgtctttctgggatgggccacgaaaaagttcggcaagaggaacaccatctggctgtttgggcctgcaactaccgggaagaccaacatcgcggaggccatagcccacactgtgcccttctacgggtgcgtaaactggaccaatgagaactttcccttcaacgactgtgtcgacaagatggtgatctggtgggaggaggggaagatgaccgccaaggtcgtggagtcggccaaagccattctcggaggaagcaaggtgcgcgtggaccagaaatgcaagtcctcggcccagatagacccgactcccgtgatcgtcacctccaacaccaacatgtgcgccgtgattgacgggaactcaacgaccttcgaacaccagcagccgttgcaagaccggatgttcaaatttgaactcacccgccgtctggatcatgactttgggaaggtcaccaagcaggaagtcaaagactttttccggtgggcaaaggatcacgtggttgaggtggagcatgaattctacgtcaaaaagggtggagccaagaaaagacccgcccccagtgacgcagatataagtgagcccaaacgggtgcgcgagtcagttgcgcagccatcgacgtcagacgcggaagcttcgatcaactacgcagacaggtaccaaaacaaatgttctcgtcacgtgggcatgaatctgatgctgtttccctgcagacaatgcgagagaatgaatcagaattcaaatatctgcttcactcacggacagaaagactgtttagagtgctttcccgtgtcagaatctcaacccgtttctgtcgtcaaaaaggcgtatcagaaactgtgctacattcatcatatcatgggaaaggtgccagacgcttgcactgcctgcgatctggtcaatgtggatttggatgactgcatctttgaacaataaatgatttaaatcaggtatggctgccgatggttatcttccagattggctcgaggacaacctctctgagggcattcgcgagtggtgggacttgaaacctggagccccgaaacccaaagccaaccagcaaaagcaggacgacggccggggtctggtgcttcctggctacaagtacctcggacccttcaacggactcgacaagggggagcccgtcaacgcggcggatgcagcggccctcgagcacgacaaggcctacgaccagcagctcaaagcgggtgacaatccgtacctgcggtataaccacgccgacgccgagtttcaggagcgtctgcaagaagatacgtcttttgggggcaacctcgggcgagcagtcttccaggccaagaagagggttctcgaaccttttggtctggttgaggaaggtgctaagacggctcctggaaagaaacgtccggtagagcagtcgccacaagagccagactcctcctcgggcattggcaagacaggccagcagcccgctaaaaagagactcaattttggtcagactggcgactcagagtcagtccccgacccacaacctctcggagaacctccagcaacccccgctgctgtgggacctactacaatggcttcaggcggtggcgcaccaatggcagacaataacgaaggcgccgacggagtgggtaatgcctcaggaaattggcattgcgattccacatggctgggcgacagagtcatcaccaccagcacccgaacatgggccttgcccacctataacaaccacctctacaagcaaatctccagtgcttcaacgggggccagcaacgacaaccactacttcggctacagcaccccctgggggtattttgatttcaacagattccactgccatttctcaccacgtgactggcagcgactcatcaacaacaattggggattccggcccaagagactcaacttcaagctcttcaacatccaagtcaaggaggtcacgacgaatgatggcgtcacgaccatcgctaataaccttaccagcacggttcaagtcttctcggactcggagtaccagttgccgtacgtcctcggctctgcgcaccagggctgcctccctccgttcccggcggacgtgttcatgattccgcagtacggctacctaacgctcaacaatggcagccaggcagtgggacggtcatccttttactgcctggaatatttcccatcgcagatgctgagaacgggcaataactttaccttcagctacaccttcgaggacgtgcctttccacagcagctacgcgcacagccagagcctggaccggctgatgaatcctctcatcgaccagtacctgtattacctgaacagaactcagaatcagtccggaagtgcccaaaacaaggacttgctgtttagccgggggtctccagctggcatgtctgttcagcccaaaaactggctacctggaccctgttaccggcagcagcgcgtttctaaaacaaaaacagacaacaacaacagcaactttacctggactggtgcttcaaaatataaccttaatgggcgtgaatctataatcaaccctggcactgctatggcctcacacaaagacgacaaagacaagttctttcccatgagcggtgtcatgatttttggaaaggagagcgccggagcttcaaacactgcattggacaatgtcatgatcacagacgaagaggaaatcaaagccactaaccccgtggccaccgaaagatttgggactgtggcagtcaatctccagagcagcagcacagaccctgcgaccggagatgtgcatgttatgggagccttacctggaatggtgtggcaagacagagacgtatacctgcagggtcctatttgggccaaaattcctcacacggatggacactttcacccgtctcctctcatgggcggctttggacttaagcacccgcctcctcagatcctcatcaaaaacacgcctgttcctgcgaatcctccggcagagttttcggctacaaagtttgcttcattcatcacccagtattccacaggacaagtgagcgtggagattgaatgggagctgcagaaagaaaacagcaaacgctggaatcccgaagtgcagtatacatctaactatgcaaaatctgccaacgttgatttcactgtggacaacaatggactttatactgagcctcgccccattggcacccgttacctcacccgtcccctgtaattgcctgttaatcaataaaccggttgattcgtttcagttgaactttggtctctgcgaagggcgaattcgtttaaacctgcaggactagagccgaattctgcatcgcgatagggataacagggtaataaataatgtactagagacactttcaataaaggcaaatgcttttatttgtacactctcgggtgattatttacccccacccttgccgtctgcgccgttcagaagtcgaaggggttctgtctggcatcggaatgggccacgggcagagacacgttccggtactggtgcttggtggaccacttgaactcaggcacgaccattctaggcagctctgtgaagttctcgctccacaggctccgcaccatcaccagggcgttcagcaggtcaggggcgctgattttgaagtcgcagttaggtccgccgccctgggctctgctgtttctgtacacagggttgcagcactggaacacaataagagcagggtggtgcacgctggccagcacagacttgtcgctgatcaggtcggcgtcgagatcctcggcgttagacaaggcaaaaggggtcagcttgggcagctggcggcccaggaaaggggcgtggccgggcttgctattgcactcgcatctcagaggcatcagcaggtggccgtggccggtctgggcgttggggtacagggcctgcataaaggccttgatctgtttgaaggccacttgggccttggcgccttcggagaagaacatgccgcagcttttgccgctgaactggttggcggggcaggcggcgtcgtgcacacaacaccgggcgtcggtattgctgatctgcaccacgtttctgccccatctgttcttcacgatcttggccttgctgctctgctctttcagggccctctggccgttctcagaggtgacgtccatctcgatcacatgttccttgttgatcatgatgctgccgtgcagacacttcagctcgccctcgatttccgcgcatctgtgcagccacagggcacaaccggtaggctcgtggtgcttgtatgtcacctcagcaaaagattgcaggtaggcttgcaggaatctgcccatcatggtcacgaaggtcttgttggaggtaaaagtcagctgcagtcctctgtgttcctcgttcagccatgtcttgcacacggcggccagagcctcgacctgatctggcagcagcttgaaattagccttcaggtcgttgtccacgtgatacttatccatcagtgctctggcggcttccatgcccttctcccaggcggaaacgatgggcacgctcagggggttcatcacggtgatctcgctttcagcttctgaaggttcctcctcttcctcctgtgttctcatgccccgagccacggggtcgtcctcattcagtctccgcacggttctttttcctccctttccgtgcttaatcagtacaggaggattagagaagcccaccatctggagggcgacgtcctccctttcttcttcgctatccacgatcacttctgggctggggggccgttcaggctttgggctaggccgtttttttttcttcttaggggcgatagccagatcagcggcgcttgtagagggccgaggactaggggttctaggcacgagggcgtcctggctgctgtcctcctcatcctcgctctcgatccgtctccgcattctcttcttagggggggcccgcggagggggagggctagggctaggggacgacacatcttccatggttggaggtctgcgagcagcgcctctgcctctctctggtgttgtctcgcgctgttcttcctctctagaggccatttccttctcctataggcagaaaaagatcgttgaaactcactccggggctgtggacgtcggcttaccttcgcaaatttgtacctgaggactaccacgcccacgagattaggttctacgaagaccaatcccgcccgcctaatgcggagcttaccgcctgcgtcattacccagggccacattcttggccaattgcaagccatcaacaaagcccgccaagagtttctgctacgaaagggacggggggtttacttggacccccagtccggcgaggagctcaacccaatccccccgccgccgcagccctatcagcagcagccgcgggcccttgcttcccaggatggcacccaaaaagaagctgcagctgccgccgccacccacggacgaggaggaatactgggacagtcaggcagaggaggttttggacgaggaggaggaggacatgatggaagactgggagagcctagacgaggaagcttccgaggtcgaagaggtgtcagacgaaacaccgtcaccctcggtcgcattcccctcgccggcgccccagaaatcggcaaccggttccagcatggctacaacctccgctcctcaggcgccgccggcactgcccgttcgccgacccaaccgtagatgggacaccactggaaccagggccggtaagtccaagcagccgccgccgttagcccaagagcaacaacagcgccaaggctaccgctcatggcgcgggcacaagaacgccatagttgcttgcttgcaagactgtgggggcaacatctccttcgcccgccgctttcttctctaccatcacggcgtggccttcccccgtaacatcctgcattactaccgtcatctctacagcccatactgcaccggcggcagcggcagcaacagcagcggccacacagaagcaaaggcgaccggatagcaagactctgacaaagcccaagaaatccacagcggcggcagcagcaggaggaggagcgctgcgtctggcgcccaacgaacccgtatcgacccgcgagcttagaaacaggatttttcccactctgtatgctatatttcaacagagcaggggccaagaacaagagctgaaaataaaaaacaggtctctgcgatccctcacccgcagctgcctgtatcacaaaagcgaagatcagcttcggcgcacgctggaagacgcggaggctctcttcagtaaatactgcgcgctgactcttaaggactagtttcgcgccctttctcaaatttaagcgcgaaaactacgtcatctccagcggccacacccggcgccagcacctgttgtcagcgccattttttagggcggagtaacttgtatgtgttgggaattgtagttttcttaaaatgggaagtgacgtaacgtgggaaaacggaagtgacgatttgaggaagttgtgggttttttggctttcgtttctgggcgtaggttcgcgtgcggttttctgggtgttttttgtggactttaaccgttacgtcattttttagtcctatatatactcgctctgcacttggcccttttttacactgtgactgattgagctggtgccgtgtcgagtggtgtttttttaataggttttcttttttactggtaaggctgactgttatgactacgtccggcgttccatttggcatgacactacgaccaacacgatctcggttgtctcggcgcactccgtacagtagggatcgtctacctccttttgagacagaaacccgcgctaccatactggaggatcatccgctgctgcccgaatgtaacactttgacaatgcacaacgtgagttacgtgcgaggtcttccctgcagtgtgggatttacgctgattcaggaatgggttgttccctgggatatggttctaacgcgggaggagcttgtaatcctgaggaagtgtatgcacgtgtgcctgtgttgtgccaacattgatatcatgacgagcatgatgatccatggttacgagtcctgggctctccactgtcattgttccagtcccggttccctgcagtgtatagccggcgggcaggttttggccagctggtttaggatggtggtggatggcgccatgtttaatcagaggtttatatggtaccgggaggtggtgaattacaacatgccaaaagaggtaatgtttatgtccagcgtgtttatgaggggtcgccacttaatctacctgcgcttgtggtatgatggccacgtgggttctgtggtccccgccatgagctttggatacagcgccttgcactgtgggattttgaacaatattgtggtgctgtgctgcagttactgtgctgatttaagtgagatcagggtgcgctgctgtgcccggaggacaaggcgccttatgctgcgggcggtgcgaatcatcgctgaggagaccactgccatgttgtattcctgcaggacggagcggcggcggcagcagtttattcgcgcgctgctgcagcaccaccgccctatcctgatgcacgattatgactctacccccatgtaggcgtggacttctccttcgccgcccgttaagcaaccgcaagttggacagcagcctgtggctcagcagctggacagcgacatgaacttaagtgagctgcccggggagtttattaatatcactgatgagcgtttggctcgacaggaaaccgtgtggaatataacacctaagaatatgtctgttacccatgatatgatgctttttaaggccagccggggagaaaggactgtgtactctgtgtgttgggagggaggtggcaggttgaatactagggttctgtgagtttgattaaggtacggtgatctgtataagctatgtggtggtggggctatactactgaatgaaaaatgacttgaaattttctgcaattgaaaaataaacacgttgaaacataacacaaacgattctttattcttgggcaatgtatgaaaaagtgtaagaggatgtggcaaatatttcattaatgtagttgtggccagaccagtcccatgaaaatgacatagagtatgcacttggagttgtgtctcctgtttcctgtgtaccgtttagtgtaatggttagtgttacaggtttagttttgtctccgtttaagtaaacttgactgacaatgttacttttggcagttttaccgtgagattttggataagctgataggttaggcataaatccaacagcgtttgtataggctgtcgcccctcctgacgcggtaggaggaggggagggtgccctgcatgtctgccgctgctcttgctcttgccgctgctgaggaggggggcgcatctgccgcagcaccggatgcatctgggaaaagcaaaaaaggggctcgtccctgtttccggaggaatttgcaagcggggtcttgcatgacggggaggcaaacccccgttcgccgcagtccggccggtccgagactcgaaccgggggtcccgcgactcaacccttggaaaataaccctccggctacagggagcgagccacttaatgctttcgctttccagcctaaccgcttacgctgcgcgcggccagtggccaaaaaagctagcgcagcagccgccgcgcctggaaggaagccaaaaggagcactcccccgttgtctgacgtcgcacacctgggttcgacacgcgggcggtaaccgcatggatcacggcggacggccggatacggggctcgaaccccggtcgtccgccatgatacccttgcgaatttatccaccagaccacggaagagtgcccgcttacaggctctccttttgcacggtctagagcgtcaacgattgcgcgcgcctgaccggccagagcgtcccgaccatggagcactttttgccgctgcgcaacatctggaaccgcgtccgcgactttccgcgcgcctccaccaccgccgccggcatcacctggatgtccaggtacatctacggatatggcaaacagctattatgggtattatgggtgcggccgcggatcccgggcccgtcgactgcagaggcctgcatgcaagcttggtgtaatcatggtcatagctgtttcctgtgtgaaattgttatccgctcacaattccacacaacatacgagccggaagcataaagtgtaaagcctggggtgcctaatgagtgagctaactcacattaattgcgttgcgctcactgcccgctttccagtcgggaaacctgtcgtgccagctgcattaatgaatcggccaacgcgcggggagaggcggtttgcgtattgggcgctcttccgcttcctcgctcactgactcgctgcgctcggtcgttcggctgcggcgagcggtatcagctcactcaaaggcggtaatacggttatccacagaatcaggggataacgcaggaaagaacatgtgagcaaaaggccagcaaaaggccaggaaccgtaaaaaggccgcgttgctggcgtttttccataggctccgcccccctgacgagcatcacaaaaatcgacgctcaagtcagaggtggcgaaacccgacaggactataaagataccaggcgtttccccctggaagctccctcgtgcgctctcctgttccgaccctgccgcttaccggatacctgtccgcctttctcccttcgggaagcgtggcgctttctcatagctcacgctgtaggtatctcagttcggtgtaggtcgttcgctccaagctgggctgtgtgcacgaaccccccgttcagcccgaccgctgcgccttatccggtaactatcgtcttgagtccaacccggtaagacacgacttatcgccactggcagcagccactggtaacaggattagcagagcgaggtatgtaggcggtgctacagagttcttgaagtggtggcctaactacggctacactagaagaacagtatttggtatctgcgctctgctgaagccagttaccttcggaaaaagagttggtagctcttgatccggcaaacaaaccaccgctggtagcggtggtttttttgtttgcaagcagcagattacgcgcagaaaaaaaggatctcaagaagatcctttgatcttttctacggggtctgacgctcagtggaacgaaaactcacgttaagggattttggtcatgagattatcaaaaaggatcttcacctagaaggtcctgtattagaggtcacgtgagtgttttgcgacattttgcgacaccatgtggtcacgctgggtatttaagcccgagtgagcacgcagggtctccattttgaagcgggaggtttgaacgcgcagccgccatccttttaaattaaaaatgaagttttaaatcaagcccaatctgaataatgttacaaccaattaaccaattctgattagaaaaactcatcgagcatcaaatgaaactgcaatttattcatatcaggattatcaataccatatttttgaaaaagccgtttctgtaatgaaggagaaaactcaccgaggcagttccataggatggcaagatcctggtatcggtctgcgattccgactcgtccaacatcaatacaacctattaatttcccctcgtcaaaaataaggttatcaagtgagaaatcaccatgagtgacgactgaatccggtgagaatggcaaaagtttatgcatttctttccagacttgttcaacaggccagccattacgctcgtcatcaaaatcactcgcatcaaccaaaccgttattcattcgtgattgcgcctgagcgagacgaaatacgcgatcgctgttaaaaggacaattacaaacaggaatcgaatgcaaccggcgcaggaacactgccagcgcatcaacaatattttcacctgaatcaggatattcttctaatacctggaatgctgtttttccggggatcgcagtggtgagtaaccatgcatcatcaggagtacggataaaatgcttgatggtcggaagaggcataaattccgtcagccagtttagtctgaccatctcatctgtaacatcattggcaacgctacctttgccatgtttcagaaacaactctggcgcatcgggcttcccatacaagcgatagattgtcgcacctgattgcccgacattatcgcgagcccatttatacccatataaatcagcatccatgttggaatttaatcgcggcctcgacgtttcccgttgaatatggctcataacaccccttgtattactgtttatgtaagcagacagttttattgttcatgatgatatatttttatcttgtgcaatgtaacatcagagattttgagacacgggccagagctgca

SEQ ID NO: 96 - DNA, 12582 bp, synthetic construct
  source 1..12582: mol_type = other DNA
tcgcgcgtttcggtgatgacggtgaaaacctctgacacatgcagctcccggagacggtcacagcttgtctgtaagcggatgccgggagcagacaagcccgtcagggcgcgtcagcgggtgttggcgggtgtcggggctggcttaactatgcggcatcagagcagattgtactgagagtgcaccatatgcggtgtgaaataccgcacagatgcgtaaggagaaaataccgcatcaggcgccattcgccattcaggctgcgcaactgttgggaagggcgatcggtgcgggcctcttcgctattacgccagctggcgaaagggggatgtgctgcaaggcgattaagttgggtaacgccagggttttcccagtcacgacgttgtaaaacgacggccagagaattccgcagggtctccattttgaagcgggaggtttgaacgcgcagccgccatgccggggttttacgagattgtgattaaggtccccagcgaccttgacgagcatctgcccggcatttctgacagctttgtgaactgggtggccgagaaggaatgggagttgccgccagattctgacatggatctgaatctgattgagcaggcacccctgaccgtggccgagaagctgcagcgcgactttctgacggaatggcgccgtgtgagtaaggccccggaggctcttttctttgtgcaatttgagaagggagagagctacttccacatgcacgtgctcgtggaaaccaccggggtgaaatccatggttttgggacgtttcctgagtcagattcgcgaaaaactgattcagagaatttaccgcgggatcgagccgactttgccaaactggttcgcggtcacaaagaccagaaatggcgccggaggcgggaacaaggtggtggatgagtgctacatccccaattacttgctccccaaaacccagcctgagctccagtgggcgtggactaatatggaacagtatttaagcgcctgtttgaatctcacggagcgtaaacggttggtggcgcagcatctgacgcacgtgtcgcagacgcaggagcagaacaaagagaatcagaatcccaattctgatgcgccggtgatcagatcaaaaacttcagccaggtacatggagctggtcgggtggctcgtggacaaggggattacctcggagaagcagtggatccaggaggaccaggcctcatacatctccttcaatgcggcctccaactcgcggtcccaaatcaaggctgccttggacaatgcgggaaagattatgagcctgactaaaaccgcccccgactacctggtgggccagcagcccgtggaggacatttccagcaatcggatttataaaattttggaactaaacgggtacgatccccaatatgcggcttccgtctttctgggatgggccacgaaaaagttcggcaagaggaacaccatctggctgtttgggcctgcaactaccgggaagaccaacatcgcggaggccatagcccacactgtgcccttctacgggtgcgtaaactggaccaatgagaactttcccttcaacgactgtgtcgacaagatggtgatctggtgggaggaggggaagatgaccgccaaggtcgtggagtcggccaaagccattctcggaggaagcaaggtgcgcgtggaccagaaatgcaagtcctcggcccagatagacccgactcccgtgatcgtcacctccaacaccaacatgtgcgccgtgattgacgggaactcaacgaccttcgaacaccagcagccgttgcaagaccggatgttcaaatttgaactcacccgccgtctggatcatgactttgggaaggtcaccaagcaggaagtcaaagactttttccggtgggcaaaggatcacgtggttgaggtggagcatgaattctacgtcaaaaagggtggagccaagaaaagacccgcccccagtgacgcagatataagtgagcccaaacgggtgcgcgagtcagttgcgcagccatcgacgtcagacgcggaagcttcgatcaactacgcagacaggtaccaaaacaaatgttctcgtcacgtgggcatgaatctgatgctgtttccctgcagacaatgcgagagaatgaatcagaattcaaatatctgcttcactcacggacagaaagactgtttagagtgctttcccgtgtcagaatctcaacccgtttctgtcgtcaaaaaggcgtatcagaaactgtgctacattcatcatatcatgggaaaggtgccagacgcttgcactgcctgcgatctggtcaatgtggatttggatgactgcatctttgaacaataaatgatttaaatcaggtatggctgccgatggttatcttccagattggctcgaggacaaccttagtgaaggaattcgcgagtggtgggctttgaaacctggagcccctcaacccaaggcaaatcaacaacatcaagacaacgctcgaggtcttgtgcttccgggttacaaataccttggacccggcaacggactcgacaagggggagccggtcaacgcagcagacgcggcggccctcgagcacgacaaggcctacgaccagcagctcaaggccggagacaacccgtacctcaagtacaaccacgccgacgccgagttccaggagcggctcaaagaagatacgtcttttgggggcaacctcgggcgagcagtcttccaggccaaaaagaggcttcttgaacctcttggtctggttgaggaagcggctaagacggctcctggaaagaagaggcctgtagagcagtctcctcaggaaccggactcctccgcgggtattggcaaatcgggtgcacagcccgctaaaaagagactcaatttcggtcagactggcgacacagagtcagtcccagaccctcaaccaatcggagaacctcccgcagccccctcaggtgtgggatctcttacaatggcttcaggtggtggcgcaccagtggcagacaataacgaaggtgccgatggagtgggtagttcctcgggaaattggcattgcgattcccaatggctgggggacagagtcatcaccaccagcacccgaacctgggccctgcccacctacaacaatcacctctacaagcaaatctccaacagcacatctggaggatcttcaaatgacaacgcctacttcggctacagcaccccctgggggtattttgacttcaacagattccactgccacttctcaccacgtgactggcagcgactcatcaacaacaactggggattccggcctaagcgactcaacttcaagctcttcaacattcaggtcaaagaggttacggacaacaatggagtcaagaccatcgccaataaccttaccagcacggtccaggtcttcacggactcagactatcagctcccgtacgtgctcgggtcggctcacgagggctgcctcccgccgttcccagcggacgttttcatgattcctcagtacgggtatctgacgcttaatgatggaagccaggccgtgggtcgttcgtccttttactgcctggaatatttcccgtcgcaaatgctaagaacgggtaacaacttccagttcagctacgagtttgagaacgtacctttccatagcagctacgctcacagccaaagcctggaccgactaatgaatccactcatcgaccaatacttgtactatctctcaaagactattaacggttctggacagaatcaacaaacgctaaaattcagtgtggccggacccagcaacatggctgtccagggaagaaactacatacctggacccagctaccgacaacaacgtgtctcaaccactgtgactcaaaacaacaacagcgaatttgcttggcctggagcttcttcttgggctctcaatggacgtaatagcttgatgaatcctggacctgctatggccagccacaaagaaggagaggaccgtttctttcctttgtctggatctttaatttttggcaaacaaggaactggaagagacaacgtggatgcggacaaagtcatgataaccaacgaagaagaaattaaaactactaacccggtagcaacggagtcctatggacaagtggccacaaaccaccagagtgcccaagcacaggcgcagaccggctgggttcaaaaccaaggaatacttccgggtatggtttggcaggacagagatgtgtacctgcaaggacccatttgggccaaaattcctcacacggacggcaactttcacccttctccgctgatgggagggtttggaatgaagcacccgcctcctcagatcctcatcaaaaacacacctgtacctgcggatcctccaacggccttcaacaaggacaagctgaactctttcatcacccagtattctactggccaagtcagcgtggagatcgagtgggagctgcagaaggaaaacagcaagcgctggaacccggagatccagtacacttccaactattacaagtctaataatgttgaatttgctgttaatactgaaggtgtatatagtgaaccccgccccattggcaccagatacctgactcgtaatctgtaattgcctgttaatcaataaaccggttgattcgtttcagttgaactttggtctctgcgaagggcgaattcgtttaaacctgcaggactagagccgaattctgcatcgcgatagggataacagggtaataaataatgtactagagacactttcaataaaggcaaatgcttttatttgtacactctcgggtgattatttacccccacccttgccgtctgcgccgtttaaaaatcaaaggggttctgccgcgcatcgctatgcgccactggcagggacacgttgcgatactggtgtttagtgctccacttaaactcaggcacaaccatccgcggcagctcggtgaagttttcactccacaggctgcgcaccatcaccaacgcgtttagcaggtcgggcgccgatatcttgaagtcgcagttggggcctccgccctgcgcgcgcgagttgcgatacacagggttgcagcactggaacactatcagcgccgggtggtgcacgctggccagcacgctcttgtcggagatcagatccgcgtccaggtcctccgcgttgctcagggcgaacggagtcaactttggtagctgccttcccaaaaagggcgcgtgcccaggctttgagttgcactcgcaccgtagtggcatcaaaaggtgaccgtgcccggtctgggcgttaggatacagcgcctgcataaaagccttgatctgcttaaaagccacctgagcctttgcgccttcagagaagaacatgccgcaagacttgccggaaaactgattggccggacaggccgcgtcgtgcacgcagcaccttgcgtcggtgttggagatctgcaccacatttcggccccaccggttcttcacgatcttggccttgctagactgctccttcagcgcgcgctgcccgttttcgctcgtcacatccatttcaatcacgtgctccttatttatcataatgcttccgtgtagacacttaagctcgccttcgatctcagcgcagcggtgcagccacaacgcgcagcccgtgggctcgtgatgcttgtaggtcacctctgcaaacgactgcaggtacgcctgcaggaatcgccccatcatcgtcacaaaggtcttgttgctggtgaaggtcagctgcaacccgcggtgctcctcgttcagccaggtcttgcatacggccgccagagcttccacttggtcaggcagtagtttgaagttcgcctttagatcgttatccacgtggtacttgtccatcagcgcgcgcgcagcctccatgcccttctcccacgcagacacgatcggcacactcagcgggttcatcaccgtaatttcactttccgcttcgctgggctcttcctcttcctcttgcgtccgcataccacgcgccactgggtcgtcttcattcagccgccgcactgtgcgcttacctcctttgccatgcttgattagcaccggtgggttgctgaaacccaccatttgtagcgccacatcttctctttcttcctcgctgtccacgattacctctggtgatggcgggcgctcgggcttgggagaagggcgcttctttttcttcttgggcgcaatggccaaatccgccgccgaggtcgatggccgcgggctgggtgtgcgcggcaccagcgcgtcttgtgatgagtcttcctcgtcctcggactcgatacgccgcctcatccgcttttttgggggcgcccggggaggcggcggcgacggggacggggacgacacgtcctccatggttgggggacgtcgcgccgcaccgcgtccgcgctcgggggtggtttcgcgctgctcctcttcccgactggccatttccttctcctataggcagaaaaagatcgttgaaactcactccggggctgtggacgtcggcttaccttcgcaaatttgtacctgaggactaccacgcccacgagattaggttctacgaagaccaatcccgcccgcctaatgcggagcttaccgcctgcgtcattacccagggccacattcttggccaattgcaagccatcaacaaagcccgccaagagtttctgctacgaaagggacggggggtttacttggacccccagtccggcgaggagctcaacccaatccccccgccgccgcagccctatcagcagcagccgcgggcccttgcttcccaggatggcacccaaaaagaagctgcagctgccgccgccacccacggacgaggaggaatactgggacagtcaggcagaggaggttttggacgaggaggaggaggacatgatggaagactgggagagcctagacgaggaagcttccgaggtcgaagaggtgtcagacgaaacaccgtcaccctcggtcgcattcccctcgccggcgccccagaaatcggcaaccggttccagcatggctacaacctccgctcctcaggcgccgccggcactgcccgttcgccgacccaaccgtagatgggacaccactggaaccagggccggtaagtccaagcagccgccgccgttagcccaagagcaacaacagcgccaaggctaccgctcatggcgcgggcacaagaacgccatagttgcttgcttgcaagactgtgggggcaacatctccttcgcccgccgctttcttctctaccatcacggcgtggccttcccccgtaacatcctgcattactaccgtcatctctacagcccatactgcaccggcggcagcggcagcaacagcagcggccacacagaagcaaaggcgaccggatagcaagactctgacaaagcccaagaaatccacagcggcggcagcagcaggaggaggagcgctgcgtctggcgcccaacgaacccgtatcgacccgcgagcttagaaacaggatttttcccactctgtatgctatatttcaacagagcaggggccaagaacaagagctgaaaataaaaaacaggtctctgcgatccctcacccgcagctgcctgtatcacaaaagcgaagatcagcttcggcgcacgctggaagacgcggaggctctcttcagtaaatactgcgcgctgactcttaaggactagtttcgcgccctttctcaaatttaagcgcgaaaactacgtcatctccagcggccacacccggcgccagcacctgttgtcagcgccattttttagggcggagtaacttgtatgtgttgggaattgtagttttcttaaaatgggaagtgacgtaacgtgggaaaacggaagtgacgatttgaggaagttgtgggttttttggctttcgtttctgggcgtaggttcgcgtgcggttttctgggtgttttttgtggactttaaccgttacgtcattttttagtcctatatatactcgctctgcacttggcccttttttacactgtgactgattgagctggtgccgtgtcgagtggtgtttttttaataggttttcttttttactggtaaggctgactgttatgactacgtccggcgttccatttggcatgacactacgaccaacacgatctcggttgtctcggcgcactccgtacagtagggatcgtctacctccttttgagacagaaacccgcgctaccatactggaggatcatccgctgctgcccgaatgtaacactttgacaatgcacaacgtgagttacgtgcgaggtcttccctgcagtgtgggatttacgctgattcaggaatgggttgttccctgggatatggttctaacgcgggaggagcttgtaatcctgaggaagtgtatgcacgtgtgcctgtgttgtgccaacattgatatcatgacgagcatgatgatccatggttacgagtcctgggctctccactgtcattgttccagtcccggttccctgcagtgtatagccggcgggcaggttttggccagctggtttaggatggtggtggatggcgccatgtttaatcagaggtttatatggtaccgggaggtggtgaattacaacatgccaaaagaggtaatgtttatgtccagcgtgtttatgaggggtcgccacttaatctacctgcgcttgtggtatgatggccacgtgggttctgtggtccccgccatgagctttggatacagcgccttgcactgtgggattttgaacaatattgtggtgctgtgctgcagttactgtgctgatttaagtgagatcagggtgcgctgctgtgcccggaggacaaggcgccttatgctgcgggcggtgcgaatcatcgctgaggagaccactgccatgttgtattcctgcaggacggagcggcggcggcagcagtttattcgcgcgctgctgcagcaccaccgccctatcctgatgcacgattatgactctacccccatgtaggcgtggacttctccttcgccgcccgttaagcaaccgcaagttggacagcagcctgtggctcagcagctggacagcgacatgaacttaagtgagctgcccggggagtttattaatatcactgatgagcgtttggctcgacaggaaaccgtgtggaatataacacctaagaatatgtctgttacccatgatatgatgctttttaaggccagccggggagaaaggactgtgtactctgtgtgttgggagggaggtggcaggttgaatactagggttctgtgagtttgattaaggtacggtgatctgtataagctatgtggtggtggggctatactactgaatgaaaaatgacttgaaattttctgcaattgaaaaataaacacgttgaaacataacacaaacgattctttattcttgggcaatgtatgaaaaagtgtaagaggatgtggcaaatatttcattaatgtagttgtggccagaccagtcccatgaaaatgacatagagtatgcacttggagttgtgtctcctgtttcctgtgtaccgtttagtgtaatggttagtgttacaggtttagttttgtctccgtttaagtaaacttgactgacaatgttacttttggcagttttaccgtgagattttggataagctgataggttaggcataaatccaacagcgtttgtataggctgtcgcccctcctgacgcggtaggaggaggggagggtgccctgcatgtctgccgctgctcttgctcttgccgctgctgaggaggggggcgcatctgccgcagcaccggatgcatctgggaaaagcaaaaaaggggctcgtccctgtttccggaggaatttgcaagcggggtcttgcatgacggggaggcaaacccccgttcgccgcagtccggccggtccgagactcgaaccgggggtcccgcgactcaacccttggaaaataaccctccggctacagggagcgagccacttaatgctttcgctttccagcctaaccgcttacgctgcgcgcggccagtggccaaaaaagctagcgcagcagccgccgcgcctggaaggaagccaaaaggagcactcccccgttgtctgacgtcgcacacctgggttcgacacgcgggcggtaaccgcatggatcacggcggacggccggatacggggctcgaaccccggtcgtccgccatgatacccttgcgaatttatccaccagaccacggaagagtgcccgcttacaggctctccttttgcacggtctagagcgtcaacgattgcgcgcgcctgaccggccagagcgtcccgaccatggagcactttttgccgctgcgcaacatctggaaccgcgtccgcgactttccgcgcgcctccaccaccgccgccggcatcacctggatgtccaggtacatctacggatatggcaaacagctattatgggtattatgggtgcggccgcggatcccgggcccgtcgactgcagaggcctgcatgcaagcttggtgtaatcatggtcatagctgtttcctgtgtgaaattgttatccgctcacaattccacacaacatacgagccggaaggtcctgtattagaggtcacgtgagtgttttgcgacattttgcgacaccatgtggtcacgctgggtatttaagcccgagtgagcacgcagggtctccattttgaagcgggaggtttgaacgcgcagccgccaagcataaagtgtaaagcctggggtgcctaatgagtgagctaactcacattaattgcgttgcgctcactgcccgctttccagtcgggaaacctgtcgtgccagctgcattaatgaatcggccaacgcgcggggagaggcggtttgcgtattgggcgctcttccgcttcctcgctcactgactcgctgcgctcggtcgttcggctgcggcgagcggtatcagctcactcaaaggcggtaatacggttatccacagaatcaggggataacgcaggaaagaacatgtgagcaaaaggccagcaaaaggccaggaaccgtaaaaaggccgcgttgctggcgtttttccataggctccgcccccctgacgagcatcacaaaaatcgacgctcaagtcagaggtggcgaaacccgacaggactataaagataccaggcgtttccccctggaagctccctcgtgcgctctcctgttccgaccctgccgcttaccggatacctgtccgcctttctcccttcgggaagcgtggcgctttctcatagctcacgctgtaggtatctcagttcggtgtaggtcgttcgctccaagctgggctgtgtgcacgaaccccccgttcagcccgaccgctgcgccttatccggtaactatcgtcttgagtccaacccggtaagacacgacttatcgccactggcagcagccactggtaacaggattagcagagcgaggtatgtaggcggtgctacagagttcttgaagtggtggcctaactacggctacactagaagaacagtatttggtatctgcgctctgctgaagccagttaccttcggaaaaagagttggtagctcttgatccggcaaacaaaccaccgctggtagcggtggtttttttgtttgcaagcagcagattacgcgcagaaaaaaaggatctcaagaagatcctttgatcttttctacggggtctgacgctcagtggaacgaaaactcacgttaagggattttggtcatgagattatcaaaaaggatcttcacctagatccttttaaattaaaaatgaagttttaaatcaagcccaatctgaataatgttacaaccaattaaccaattctgattagaaaaactcatcgagcatcaaatgaaactgcaatttattcatatcaggattatcaataccatatttttgaaaaagccgtttctgtaatgaaggagaaaactcaccgaggcagttccataggatggcaagatcctggtatcggtctgcgattccgactcgtccaacatcaatacaacctattaatttcccctcgtcaaaaataaggttatcaagtgagaaatcaccatgagtgacgactgaatccggtgagaatggcaaaagtttatgcatttctttccagacttgttcaacaggccagccattacgctcgtcatcaaaatcactcgcatcaaccaaaccgttattcattcgtgattgcgcctgagcgagacgaaatacgcgatcgctgttaaaaggacaattacaaacaggaatcgaatgcaaccggcgcaggaacactgccagcgcatcaacaatattttcacctgaatcaggatattcttctaatacctggaatgctgtttttccggggatcgcagtggtgagtaaccatgcatcatcaggagtacggataaaatgcttgatggtcggaagaggcataaattccgtcagccagtttagtctgaccatctcatctgtaacatcattggcaacgctacctttgccatgtttcagaaacaactctggcgcatcgggcttcccatacaagcgatagattgtcgcacctgattgcccgacattatcgcgagcccatttatacccatataaatcagcatccatgttggaatttaatcgcggcctcgacgtttcccgttgaatatggctcataacaccccttgtattactgtttatgtaagcagacagttttattgttcatgatgatatatttttatcttgtgcaatgtaacatcagagattttgagacacgggccagagctgca

SEQ ID NO: 97 - DNA, 12579 bp, synthetic construct
  source 1..12579: mol_type = other DNA
tcgcgcgtttcggtgatgacggtgaaaacctctgacacatgcagctcccggagacggtcacagcttgtctgtaagcggatgccgggagcagacaagcccgtcagggcgcgtcagcgggtgttggcgggtgtcggggctggcttaactatgcggcatcagagcagattgtactgagagtgcaccatatgcggtgtgaaataccgcacagatgcgtaaggagaaaataccgcatcaggcgccattcgccattcaggctgcgcaactgttgggaagggcgatcggtgcgggcctcttcgctattacgccagctggcgaaagggggatgtgctgcaaggcgattaagttgggtaacgccagggttttcccagtcacgacgttgtaaaacgacggccagagaattccgcagggtctccattttgaagcgggaggtttgaacgcgcagccgccatgccggggttttacgagattgtgattaaggtccccagcgaccttgacgagcatctgcccggcatttctgacagctttgtgaactgggtggccgagaaggaatgggagttgccgccagattctgacatggatctgaatctgattgagcaggcacccctgaccgtggccgagaagctgcagcgcgactttctgacggaatggcgccgtgtgagtaaggccccggaggctcttttctttgtgcaatttgagaagggagagagctacttccacatgcacgtgctcgtggaaaccaccggggtgaaatccatggttttgggacgtttcctgagtcagattcgcgaaaaactgattcagagaatttaccgcgggatcgagccgactttgccaaactggttcgcggtcacaaagaccagaaatggcgccggaggcgggaacaaggtggtggatgagtgctacatccccaattacttgctccccaaaacccagcctgagctccagtgggcgtggactaatatggaacagtatttaagcgcctgtttgaatctcacggagcgtaaacggttggtggcgcagcatctgacgcacgtgtcgcagacgcaggagcagaacaaagagaatcagaatcccaattctgatgcgccggtgatcagatcaaaaacttcagccaggtacatggagctggtcgggtggctcgtggacaaggggattacctcggagaagcagtggatccaggaggaccaggcctcatacatctccttcaatgcggcctccaactcgcggtcccaaatcaaggctgccttggacaatgcgggaaagattatgagcctgactaaaaccgcccccgactacctggtgggccagcagcccgtggaggacatttccagcaatcggatttataaaattttggaactaaacgggtacgatccccaatatgcggcttccgtctttctgggatgggccacgaaaaagttcggcaagaggaacaccatctggctgtttgggcctgcaactaccgggaagaccaacatcgcggaggccatagcccacactgtgcccttctacgggtgcgtaaactggaccaatgagaactttcccttcaacgactgtgtcgacaagatggtgatctggtgggaggaggggaagatgaccgccaaggtcgtggagtcggccaaagccattctcggaggaagcaaggtgcgcgtggaccagaaatgcaagtcctcggcccagatagacccgactcccgtgatcgtcacctccaacaccaacatgtgcgccgtgattgacgggaactcaacgaccttcgaacaccagcagccgttgcaagaccggatgttcaaatttgaactcacccgccgtctggatcatgactttgggaaggtcaccaagcaggaagtcaaagactttttccggtgggcaaaggatcacgtggttgaggtggagcatgaattctacgtcaaaaagggtggagccaagaaaagacccgcccccagtgacgcagatataagtgagcccaaacgggtgcgcgagtcagttgcgcagccatcgacgtcagacgcggaagcttcgatcaactacgcagacaggtaccaaaacaaatgttctcgtcacgtgggcatgaatctgatgctgtttccctgcagacaatgcgagagaatgaatcagaattcaaatatctgcttcactcacggacagaaagactgtttagagtgctttcccgtgtcagaatctcaacccgtttctgtcgtcaaaaaggcgtatcagaaactgtgctacattcatcatatcatgggaaaggtgccagacgcttgcactgcctgcgatctggtcaatgtggatttggatgactgcatctttgaacaataaatgatttaaatcaggtatggctgccgatggttatcttccagattggctcgaggacactctctctgaaggaataagacagtggtggaagctcaaacctggcccaccaccaccaaagcccgcagagcggcataaggacgacagcaggggtcttgtgcttcctgggtacaagtacctcggacccttcaacggactcgacaagggagagccggtcaacgaggcagacgccgcggccctcgagcacgacaaagcctacgaccggcagctcgacagcggagacaacccgtacctcaagtacaaccacgccgacgcggagtttcaggagcgccttaaagaagatacgtcttttgggggcaacctcggacgagcagtcttccaggcgaaaaagagggttcttgaacctctgggcctggttgaggaacctgttaagacggctccgggaaaaaagaggccggtagagcactctcctgtggagccagactcctcctcgggaaccggaaaggcgggccagcagcctgcaagaaaaagattgaattttggtcagactggagacgcagactcagtacctgacccccagcctctcggacagccaccagcagccccctctggtctgggaactaatacgatggctacaggcagtggcgcaccaatggcagacaataacgagggcgccgacggagtgggtaattcctcgggaaattggcattgcgattccacatggatgggcgacagagtcatcaccaccagcacccgaacctgggccctgcccacctacaacaaccacctctacaaacaaatttccagccaatcaggagcctcgaacgacaatcactactttggctacagcaccccttgggggtattttgacttcaacagattccactgccacttttcaccacgtgactggcaaagactcatcaacaacaactggggattccgacccaagagactcaacttcaagctctttaacattcaagtcaaagaggtcacgcagaatgacggtacgacgacgattgccaataaccttaccagcacggttcaggtgtttactgactcggagtaccagctcccgtacgtcctcggctcggcgcatcaaggatgcctcccgccgttcccagcagacgtcttcatggtgccacagtatggatacctcaccctgaacaacgggagtcaggcagtaggacgctcttcattttactgcctggagtactttccttctcagatgctgcgtaccggaaacaactttaccttcagctacacttttgaggacgttcctttccacagcagctacgctcacagccagagtctggaccgtctcatgaatcctctcatcgaccagtacctgtattacttgagcagaacaaacactccaagtggaaccaccacgcagtcaaggcttcagttttctcaggccggagcgagtgacattcgggaccagtctaggaactggcttcctggaccctgttaccgccagcagcgagtatcaaagacatctgcggataacaacaacagtgaatactcgtggactggagctaccaagtaccacctcaatggcagagactctctggtgaatccgggcccggccatggcaagccacaaggacgatgaagaaaagttttttcctcagagcggggttctcatctttgggaagcaaggctcagagaaaacaaatgtggacattgaaaaggtcatgattacagacgaagaggaaatcaggacaaccaatcccgtggctacggagcagtatggttctgtatctaccaacctccagagaggcaacagacaagcagctaccgcagatgtcaacacacaaggcgttcttccaggcatggtctggcaggacagagatgtgtaccttcaggggcccatctgggcaaagattccacacacggacggacattttcacccctctcccctcatgggtggattcggacttaaacaccctcctccacagattctcatcaagaacaccccggtacctgcgaatccttcgaccaccttcagtgcggcaaagtttgcttccttcatcacacagtactccacgggacaggtcagcgtggagatcgagtgggagctgcagaaggaaaacagcaaacgctggaatcccgaaattcagtacacttccaactacaacaagtctgttaatgtggactttactgtggacactaatggcgtgtattcagagcctcgccccattggcaccagatacctgactcgtaatctgtaattgcctgttaatcaataaaccggttgattcgtttcagttgaactttggtctctgcgaagggcgaattcgtttaaacctgcaggactagagccgaattctgcatcgcgatagggataacagggtaataaataatgtactagagacactttcaataaaggcaaatgcttttatttgtacactctcgggtgattatttacccccacccttgccgtctgcgccgtttaaaaatcaaaggggttctgccgcgcatcgctatgcgccactggcagggacacgttgcgatactggtgtttagtgctccacttaaactcaggcacaaccatccgcggcagctcggtgaagttttcactccacaggctgcgcaccatcaccaacgcgtttagcaggtcgggcgccgatatcttgaagtcgcagttggggcctccgccctgcgcgcgcgagttgcgatacacagggttgcagcactggaacactatcagcgccgggtggtgcacgctggccagcacgctcttgtcggagatcagatccgcgtccaggtcctccgcgttgctcagggcgaacggagtcaactttggtagctgccttcccaaaaagggcgcgtgcccaggctttgagttgcactcgcaccgtagtggcatcaaaaggtgaccgtgcccggtctgggcgttaggatacagcgcctgcataaaagccttgatctgcttaaaagccacctgagcctttgcgccttcagagaagaacatgccgcaagacttgccggaaaactgattggccggacaggccgcgtcgtgcacgcagcaccttgcgtcggtgttggagatctgcaccacatttcggccccaccggttcttcacgatcttggccttgctagactgctccttcagcgcgcgctgcccgttttcgctcgtcacatccatttcaatcacgtgctccttatttatcataatgcttccgtgtagacacttaagctcgccttcgatctcagcgcagcggtgcagccacaacgcgcagcccgtgggctcgtgatgcttgtaggtcacctctgcaaacgactgcaggtacgcctgcaggaatcgccccatcatcgtcacaaaggtcttgttgctggtgaaggtcagctgcaacccgcggtgctcctcgttcagccaggtcttgcatacggccgccagagcttccacttggtcaggcagtagtttgaagttcgcctttagatcgttatccacgtggtacttgtccatcagcgcgcgcgcagcctccatgcccttctcccacgcagacacgatcggcacactcagcgggttcatcaccgtaatttcactttccgcttcgctgggctcttcctcttcctcttgcgtccgcataccacgcgccactgggtcgtcttcattcagccgccgcactgtgcgcttacctcctttgccatgcttgattagcaccggtgggttgctgaaacccaccatttgtagcgccacatcttctctttcttcctcgctgtccacgattacctctggtgatggcgggcgctcgggcttgggagaagggcgcttctttttcttcttgggcgcaatggccaaatccgccgccgaggtcgatggccgcgggctgggtgtgcgcggcaccagcgcgtcttgtgatgagtcttcctcgtcctcggactcgatacgccgcctcatccgcttttttgggggcgcccggggaggcggcggcgacggggacggggacgacacgtcctccatggttgggggacgtcgcgccgcaccgcgtccgcgctcgggggtggtttcgcgctgctcctcttcccgactggccatttccttctcctataggcagaaaaagatcgttgaaactcactccggggctgtggacgtcggcttaccttcgcaaatttgtacctgaggactaccacgcccacgagattaggttctacgaagaccaatcccgcccgcctaatgcggagcttaccgcctgcgtcattacccagggccacattcttggccaattgcaagccatcaacaaagcccgccaagagtttctgctacgaaagggacggggggtttacttggacccccagtccggcgaggagctcaacccaatccccccgccgccgcagccctatcagcagcagccgcgggcccttgcttcccaggatggcacccaaaaagaagctgcagctgccgccgccacccacggacgaggaggaatactgggacagtcaggcagaggaggttttggacgaggaggaggaggacatgatggaagactgggagagcctagacgaggaagcttccgaggtcgaagaggtgtcagacgaaacaccgtcaccctcggtcgcattcccctcgccggcgccccagaaatcggcaaccggttccagcatggctacaacctccgctcctcaggcgccgccggcactgcccgttcgccgacccaaccgtagatgggacaccactggaaccagggccggtaagtccaagcagccgccgccgttagcccaagagcaacaacagcgccaaggctaccgctcatggcgcgggcacaagaacgccatagttgcttgcttgcaagactgtgggggcaacatctccttcgcccgccgctttcttctctaccatcacggcgtggccttcccccgtaacatcctgcattactaccgtcatctctacagcccatactgcaccggcggcagcggcagcaacagcagcggccacacagaagcaaaggcgaccggatagcaagactctgacaaagcccaagaaatccacagcggcggcagcagcaggaggaggagcgctgcgtctggcgcccaacgaacccgtatcgacccgcgagcttagaaacaggatttttcccactctgtatgctatatttcaacagagcaggggccaagaacaagagctgaaaataaaaaacaggtctctgcgatccctcacccgcagctgcctgtatcacaaaagcgaagatcagcttcggcgcacgctggaagacgcggaggctctcttcagtaaatactgcgcgctgactcttaaggactagtttcgcgccctttctcaaatttaagcgcgaaaactacgtcatctccagcggccacacccggcgccagcacctgttgtcagcgccattttttagggcggagtaacttgtatgtgttgggaattgtagttttcttaaaatgggaagtgacgtaacgtgggaaaacggaagtgacgatttgaggaagttgtgggttttttggctttcgtttctgggcgtaggttcgcgtgcggttttctgggtgttttttgtggactttaaccgttacgtcattttttagtcctatatatactcgctctgcacttggcccttttttacactgtgactgattgagctggtgccgtgtcgagtggtgtttttttaataggttttcttttttactggtaaggctgactgttatgactacgtccggcgttccatttggcatgacactacgaccaacacgatctcggttgtctcggcgcactccgtacagtagggatcgtctacctccttttgagacagaaacccgcgctaccatactggaggatcatccgctgctgcccgaatgtaacactttgacaatgcacaacgtgagttacgtgcgaggtcttccctgcagtgtgggatttacgctgattcaggaatgggttgttccctgggatatggttctaacgcgggaggagcttgtaatcctgaggaagtgtatgcacgtgtgcctgtgttgtgccaacattgatatcatgacgagcatgatgatccatggttacgagtcctgggctctccactgtcattgttccagtcccggttccctgcagtgtatagccggcgggcaggttttggccagctggtttaggatggtggtggatggcgccatgtttaatcagaggtttatatggtaccgggaggtggtgaattacaacatgccaaaagaggtaatgtttatgtccagcgtgtttatgaggggtcgccacttaatctacctgcgcttgtggtatgatggccacgtgggttctgtggtccccgccatgagctttggatacagcgccttgcactgtgggattttgaacaatattgtggtgctgtgctgcagttactgtgctgatttaagtgagatcagggtgcgctgctgtgcccggaggacaaggcgccttatgctgcgggcggtgcgaatcatcgctgaggagaccactgccatgttgtattcctgcaggacggagcggcggcggcagcagtttattcgcgcgctgctgcagcaccaccgccctatcctgatgcacgattatgactctacccccatgtaggcgtggacttctccttcgccgcccgttaagcaaccgcaagttggacagcagcctgtggctcagcagctggacagcgacatgaacttaagtgagctgcccggggagtttattaatatcactgatgagcgtttggctcgacaggaaaccgtgtggaatataacacctaagaatatgtctgttacccatgatatgatgctttttaaggccagccggggagaaaggactgtgtactctgtgtgttgggagggaggtggcaggttgaatactagggttctgtgagtttgattaaggtacggtgatctgtataagctatgtggtggtggggctatactactgaatgaaaaatgacttgaaattttctgcaattgaaaaataaacacgttgaaacataacacaaacgattctttattcttgggcaatgtatgaaaaagtgtaagaggatgtggcaaatatttcattaatgtagttgtggccagaccagtcccatgaaaatgacatagagtatgcacttggagttgtgtctcctgtttcctgtgtaccgtttagtgtaatggttagtgttacaggtttagttttgtctccgtttaagtaaacttgactgacaatgttacttttggcagttttaccgtgagattttggataagctgataggttaggcataaatccaacagcgtttgtataggctgtcgcccctcctgacgcggtaggaggaggggagggtgccctgcatgtctgccgctgctcttgctcttgccgctgctgaggaggggggcgcatctgccgcagcaccggatgcatctgggaaaagcaaaaaaggggctcgtccctgtttccggaggaatttgcaagcggggtcttgcatgacggggaggcaaacccccgttcgccgcagtccggccggtccgagactcgaaccgggggtcccgcgactcaacccttggaaaataaccctccggctacagggagcgagccacttaatgctttcgctttccagcctaaccgcttacgctgcgcgcggccagtggccaaaaaagctagcgcagcagccgccgcgcctggaaggaagccaaaaggagcactcccccgttgtctgacgtcgcacacctgggttcgacacgcgggcggtaaccgcatggatcacggcggacggccggatacggggctcgaaccccggtcgtccgccatgatacccttgcgaatttatccaccagaccacggaagagtgcccgcttacaggctctccttttgcacggtctagagcgtcaacgattgcgcgcgcctgaccggccagagcgtcccgaccatggagcactttttgccgctgcgcaacatctggaaccgcgtccgcgactttccgcgcgcctccaccaccgccgccggcatcacctggatgtccaggtacatctacggatatggcaaacagctattatgggtattatgggtgcggccgcggatcccgggcccgtcgactgcagaggcctgcatgcaagcttggtgtaatcatggtcatagctgtttcctgtgtgaaattgttatccgctcacaattccacacaacatacgagccggaaggtcctgtattagaggtcacgtgagtgttttgcgacattttgcgacaccatgtggtcacgctgggtatttaagcccgagtgagcacgcagggtctccattttgaagcgggaggtttgaacgcgcagccgccaagcataaagtgtaaagcctggggtgcctaatgagtgagctaactcacattaattgcgttgcgctcactgcccgctttccagtcgggaaacctgtcgtgccagctgcattaatgaatcggccaacgcgcggggagaggcggtttgcgtattgggcgctcttccgcttcctcgctcactgactcgctgcgctcggtcgttcggctgcggcgagcggtatcagctcactcaaaggcggtaatacggttatccacagaatcaggggataacgcaggaaagaacatgtgagcaaaaggccagcaaaaggccaggaaccgtaaaaaggccgcgttgctggcgtttttccataggctccgcccccctgacgagcatcacaaaaatcgacgctcaagtcagaggtggcgaaacccgacaggactataaagataccaggcgtttccccctggaagctccctcgtgcgctctcctgttccgaccctgccgcttaccggatacctgtccgcctttctcccttcgggaagcgtggcgctttctcatagctcacgctgtaggtatctcagttcggtgtaggtcgttcgctccaagctgggctgtgtgcacgaaccccccgttcagcccgaccgctgcgccttatccggtaactatcgtcttgagtccaacccggtaagacacgacttatcgccactggcagcagccactggtaacaggattagcagagcgaggtatgtaggcggtgctacagagttcttgaagtggtggcctaactacggctacactagaagaacagtatttggtatctgcgctctgctgaagccagttaccttcggaaaaagagttggtagctcttgatccggcaaacaaaccaccgctggtagcggtggtttttttgtttgcaagcagcagattacgcgcagaaaaaaaggatctcaagaagatcctttgatcttttctacggggtctgacgctcagtggaacgaaaactcacgttaagggattttggtcatgagattatcaaaaaggatcttcacctagatccttttaaattaaaaatgaagttttaaatcaagcccaatctgaataatgttacaaccaattaaccaattctgattagaaaaactcatcgagcatcaaatgaaactgcaatttattcatatcaggattatcaataccatatttttgaaaaagccgtttctgtaatgaaggagaaaactcaccgaggcagttccataggatggcaagatcctggtatcggtctgcgattccgactcgtccaacatcaatacaacctattaatttcccctcgtcaaaaataaggttatcaagtgagaaatcaccatgagtgacgactgaatccggtgagaatggcaaaagtttatgcatttctttccagacttgttcaacaggccagccattacgctcgtcatcaaaatcactcgcatcaaccaaaccgttattcattcgtgattgcgcctgagcgagacgaaatacgcgatcgctgttaaaaggacaattacaaacaggaatcgaatgcaaccggcgcaggaacactgccagcgcatcaacaatattttcacctgaatcaggatattcttctaatacctggaatgctgtttttccggggatcgcagtggtgagtaaccatgcatcatcaggagtacggataaaatgcttgatggtcggaagaggcataaattccgtcagccagtttagtctgaccatctcatctgtaacatcattggcaacgctacctttgccatgtttcagaaacaactctggcgcatcgggcttcccatacaagcgatagattgtcgcacctgattgcccgacattatcgcgagcccatttatacccatataaatcagcatccatgttggaatttaatcgcggcctcgacgtttcccgttgaatatggctcataacaccccttgtattactgtttatgtaagcagacagttttattgttcatgatgatatatttttatcttgtgcaatgtaacatcagagattttgagacacgggccagagctgca

SEQ ID NO: 98 - DNA, 12582 bp, synthetic construct
  source 1..12582: mol_type = other DNA
tcgcgcgtttcggtgatgacggtgaaaacctctgacacatgcagctcccggagacggtcacagcttgtctgtaagcggatgccgggagcagacaagcccgtcagggcgcgtcagcgggtgttggcgggtgtcggggctggcttaactatgcggcatcagagcagattgtactgagagtgcaccatatgcggtgtgaaataccgcacagatgcgtaaggagaaaataccgcatcaggcgccattcgccattcaggctgcgcaactgttgggaagggcgatcggtgcgggcctcttcgctattacgccagctggcgaaagggggatgtgctgcaaggcgattaagttgggtaacgccagggttttcccagtcacgacgttgtaaaacgacggccagagaattccgcagggtctccattttgaagcgggaggtttgaacgcgcagccgccatgccggggttttacgagattgtgattaaggtccccagcgaccttgacgagcatctgcccggcatttctgacagctttgtgaactgggtggccgagaaggaatgggagttgccgccagattctgacatggatctgaatctgattgagcaggcacccctgaccgtggccgagaagctgcagcgcgactttctgacggaatggcgccgtgtgagtaaggccccggaggctcttttctttgtgcaatttgagaagggagagagctacttccacatgcacgtgctcgtggaaaccaccggggtgaaatccatggttttgggacgtttcctgagtcagattcgcgaaaaactgattcagagaatttaccgcgggatcgagccgactttgccaaactggttcgcggtcacaaagaccagaaatggcgccggaggcgggaacaaggtggtggatgagtgctacatccccaattacttgctccccaaaacccagcctgagctccagtgggcgtggactaatatggaacagtatttaagcgcctgtttgaatctcacggagcgtaaacggttggtggcgcagcatctgacgcacgtgtcgcagacgcaggagcagaacaaagagaatcagaatcccaattctgatgcgccggtgatcagatcaaaaacttcagccaggtacatggagctggtcgggtggctcgtggacaaggggattacctcggagaagcagtggatccaggaggaccaggcctcatacatctccttcaatgcggcctccaactcgcggtcccaaatcaaggctgccttggacaatgcgggaaagattatgagcctgactaaaaccgcccccgactacctggtgggccagcagcccgtggaggacatttccagcaatcggatttataaaattttggaactaaacgggtacgatccccaatatgcggcttccgtctttctgggatgggccacgaaaaagttcggcaagaggaacaccatctggctgtttgggcctgcaactaccgggaagaccaacatcgcggaggccatagcccacactgtgcccttctacgggtgcgtaaactggaccaatgagaactttcccttcaacgactgtgtcgacaagatggtgatctggtgggaggaggggaagatgaccgccaaggtcgtggagtcggccaaagccattctcggaggaagcaaggtgcgcgtggaccagaaatgcaagtcctcggcccagatagacccgactcccgtgatcgtcacctccaacaccaacatgtgcgccgtgattgacgggaactcaacgaccttcgaacaccagcagccgttgcaagaccggatgttcaaatttgaactcacccgccgtctggatcatgactttgggaaggtcaccaagcaggaagtcaaagactttttccggtgggcaaaggatcacgtggttgaggtggagcatgaattctacgtcaaaaagggtggagccaagaaaagacccgcccccagtgacgcagatataagtgagcccaaacgggtgcgcgagtcagttgcgcagccatcgacgtcagacgcggaagcttcgatcaactacgcagacaggtaccaaaacaaatgttctcgtcacgtgggcatgaatctgatgctgtttccctgcagacaatgcgagagaatgaatcagaattcaaatatctgcttcactcacggacagaaagactgtttagagtgctttcccgtgtcagaatctcaacccgtttctgtcgtcaaaaaggcgtatcagaaactgtgctacattcatcatatcatgggaaaggtgccagacgcttgcactgcctgcgatctggtcaatgtggatttggatgactgcatctttgaacaataaatgatttaaatcaggtatggctgccgatggttatcttccagattggctcgaggacaacctctctgagggcattcgcgagtggtgggacttgaaacctggagccccgaaacccaaagccaaccagcaaaagcaggacgacggccggggtctggtgcttcctggctacaagtacctcggacccttcaacggactcgacaagggggagcccgtcaacgcggcggatgcagcggccctcgagcacgacaaggcctacgaccagcagctcaaagcgggtgacaatccgtacctgcggtataaccacgccgacgccgagtttcaggagcgtctgcaagaagatacgtcttttgggggcaacctcgggcgagcagtcttccaggccaagaagagggttctcgaaccttttggtctggttgaggaaggtgctaagacggctcctggaaagaaacgtccggtagagcagtcgccacaagagccagactcctcctcgggcattggcaagacaggccagcagcccgctaaaaagagactcaattttggtcagactggcgactcagagtcagtccccgacccacaacctctcggagaacctccagcaacccccgctgctgtgggacctactacaatggcttcaggcggtggcgcaccaatggcagacaataacgaaggcgccgacggagtgggtaatgcctcaggaaattggcattgcgattccacatggctgggcgacagagtcatcaccaccagcacccgaacatgggccttgcccacctataacaaccacctctacaagcaaatctccagtgcttcaacgggggccagcaacgacaaccactacttcggctacagcaccccctgggggtattttgatttcaacagattccactgccatttctcaccacgtgactggcagcgactcatcaacaacaattggggattccggcccaagagactcaacttcaagctcttcaacatccaagtcaaggaggtcacgacgaatgatggcgtcacgaccatcgctaataaccttaccagcacggttcaagtcttctcggactcggagtaccagttgccgtacgtcctcggctctgcgcaccagggctgcctccctccgttcccggcggacgtgttcatgattccgcagtacggctacctaacgctcaacaatggcagccaggcagtgggacggtcatccttttactgcctggaatatttcccatcgcagatgctgagaacgggcaataactttaccttcagctacaccttcgaggacgtgcctttccacagcagctacgcgcacagccagagcctggaccggctgatgaatcctctcatcgaccagtacctgtattacctgaacagaactcagaatcagtccggaagtgcccaaaacaaggacttgctgtttagccgggggtctccagctggcatgtctgttcagcccaaaaactggctacctggaccctgttaccggcagcagcgcgtttctaaaacaaaaacagacaacaacaacagcaactttacctggactggtgcttcaaaatataaccttaatgggcgtgaatctataatcaaccctggcactgctatggcctcacacaaagacgacaaagacaagttctttcccatgagcggtgtcatgatttttggaaaggagagcgccggagcttcaaacactgcattggacaatgtcatgatcacagacgaagaggaaatcaaagccactaaccccgtggccaccgaaagatttgggactgtggcagtcaatctccagagcagcagcacagaccctgcgaccggagatgtgcatgttatgggagccttacctggaatggtgtggcaagacagagacgtatacctgcagggtcctatttgggccaaaattcctcacacggatggacactttcacccgtctcctctcatgggcggctttggacttaagcacccgcctcctcagatcctcatcaaaaacacgcctgttcctgcgaatcctccggcagagttttcggctacaaagtttgcttcattcatcacccagtattccacaggacaagtgagcgtggagattgaatgggagctgcagaaagaaaacagcaaacgctggaatcccgaagtgcagtatacatctaactatgcaaaatctgccaacgttgatttcactgtggacaacaatggactttatactgagcctcgccccattggcacccgttacctcacccgtcccctgtaattgcctgttaatcaataaaccggttgattcgtttcagttgaactttggtctctgcgaagggcgaattcgtttaaacctgcaggactagagccgaattctgcatcgcgatagggataacagggtaataaataatgtactagagacactttcaataaaggcaaatgcttttatttgtacactctcgggtgattatttacccccacccttgccgtctgcgccgtttaaaaatcaaaggggttctgccgcgcatcgctatgcgccactggcagggacacgttgcgatactggtgtttagtgctccacttaaactcaggcacaaccatccgcggcagctcggtgaagttttcactccacaggctgcgcaccatcaccaacgcgtttagcaggtcgggcgccgatatcttgaagtcgcagttggggcctccgccctgcgcgcgcgagttgcgatacacagggttgcagcactggaacactatcagcgccgggtggtgcacgctggccagcacgctcttgtcggagatcagatccgcgtccaggtcctccgcgttgctcagggcgaacggagtcaactttggtagctgccttcccaaaaagggcgcgtgcccaggctttgagttgcactcgcaccgtagtggcatcaaaaggtgaccgtgcccggtctgggcgttaggatacagcgcctgcataaaagccttgatctgcttaaaagccacctgagcctttgcgccttcagagaagaacatgccgcaagacttgccggaaaactgattggccggacaggccgcgtcgtgcacgcagcaccttgcgtcggtgttggagatctgcaccacatttcggccccaccggttcttcacgatcttggccttgctagactgctccttcagcgcgcgctgcccgttttcgctcgtcacatccatttcaatcacgtgctccttatttatcataatgcttccgtgtagacacttaagctcgccttcgatctcagcgcagcggtgcagccacaacgcgcagcccgtgggctcgtgatgcttgtaggtcacctctgcaaacgactgcaggtacgcctgcaggaatcgccccatcatcgtcacaaaggtcttgttgctggtgaaggtcagctgcaacccgcggtgctcctcgttcagccaggtcttgcatacggccgccagagcttccacttggtcaggcagtagtttgaagttcgcctttagatcgttatccacgtggtacttgtccatcagcgcgcgcgcagcctccatgcccttctcccacgcagacacgatcggcacactcagcgggttcatcaccgtaatttcactttccgcttcgctgggctcttcctcttcctcttgcgtccgcataccacgcgccactgggtcgtcttcattcagccgccgcactgtgcgcttacctcctttgccatgcttgattagcaccggtgggttgctgaaacccaccatttgtagcgccacatcttctctttcttcctcgctgtccacgattacctctggtgatggcgggcgctcgggcttgggagaagggcgcttctttttcttcttgggcgcaatggccaaatccgccgccgaggtcgatggccgcgggctgggtgtgcgcggcaccagcgcgtcttgtgatgagtcttcctcgtcctcggactcgatacgccgcctcatccgcttttttgggggcgcccggggaggcggcggcgacggggacggggacgacacgtcctccatggttgggggacgtcgcgccgcaccgcgtccgcgctcgggggtggtttcgcgctgctcctcttcccgactggccatttccttctcctataggcagaaaaagatcgttgaaactcactccggggctgtggacgtcggcttaccttcgcaaatttgtacctgaggactaccacgcccacgagattaggttctacgaagaccaatcccgcccgcctaatgcggagcttaccgcctgcgtcattacccagggccacattcttggccaattgcaagccatcaacaaagcccgccaagagtttctgctacgaaagggacggggggtttacttggacccccagtccggcgaggagctcaacccaatccccccgccgccgcagccctatcagcagcagccgcgggcccttgcttcccaggatggcacccaaaaagaagctgcagctgccgccgccacccacggacgaggaggaatactgggacagtcaggcagaggaggttttggacgaggaggaggaggacatgatggaagactgggagagcctagacgaggaagcttccgaggtcgaagaggtgtcagacgaaacaccgtcaccctcggtcgcattcccctcgccggcgccccagaaatcggcaaccggttccagcatggctacaacctccgctcctcaggcgccgccggcactgcccgttcgccgacccaaccgtagatgggacaccactggaaccagggccggtaagtccaagcagccgccgccgttagcccaagagcaacaacagcgccaaggctaccgctcatggcgcgggcacaagaacgccatagttgcttgcttgcaagactgtgggggcaacatctccttcgcccgccgctttcttctctaccatcacggcgtggccttcccccgtaacatcctgcattactaccgtcatctctacagcccatactgcaccggcggcagcggcagcaacagcagcggccacacagaagcaaaggcgaccggatagcaagactctgacaaagcccaagaaatccacagcggcggcagcagcaggaggaggagcgctgcgtctggcgcccaacgaacccgtatcgacccgcgagcttagaaacaggatttttcccactctgtatgctatatttcaacagagcaggggccaagaacaagagctgaaaataaaaaacaggtctctgcgatccctcacccgcagctgcctgtatcacaaaagcgaagatcagcttcggcgcacgctggaagacgcggaggctctcttcagtaaatactgcgcgctgactcttaaggactagtttcgcgccctttctcaaatttaagcgcgaaaactacgtcatctccagcggccacacccggcgccagcacctgttgtcagcgccattttttagggcggagtaacttgtatgtgttgggaattgtagttttcttaaaatgggaagtgacgtaacgtgggaaaacggaagtgacgatttgaggaagttgtgggttttttggctttcgtttctgggcgtaggttcgcgtgcggttttctgggtgttttttgtggactttaaccgttacgtcattttttagtcctatatatactcgctctgcacttggcccttttttacactgtgactgattgagctggtgccgtgtcgagtggtgtttttttaataggttttcttttttactggtaaggctgactgttatgactacgtccggcgttccatttggcatgacactacgaccaacacgatctcggttgtctcggcgcactccgtacagtagggatcgtctacctccttttgagacagaaacccgcgctaccatactggaggatcatccgctgctgcccgaatgtaacactttgacaatgcacaacgtgagttacgtgcgaggtcttccctgcagtgtgggatttacgctgattcaggaatgggttgttccctgggatatggttctaacgcgggaggagcttgtaatcctgaggaagtgtatgcacgtgtgcctgtgttgtgccaacattgatatcatgacgagcatgatgatccatggttacgagtcctgggctctccactgtcattgttccagtcccggttccctgcagtgtatagccggcgggcaggttttggccagctggtttaggatggtggtggatggcgccatgtttaatcagaggtttatatggtaccgggaggtggtgaattacaacatgccaaaagaggtaatgtttatgtccagcgtgtttatgaggggtcgccacttaatctacctgcgcttgtggtatgatggccacgtgggttctgtggtccccgccatgagctttggatacagcgccttgcactgtgggattttgaacaatattgtggtgctgtgctgcagttactgtgctgatttaagtgagatcagggtgcgctgctgtgcccggaggacaaggcgccttatgctgcgggcggtgcgaatcatcgctgaggagaccactgccatgttgtattcctgcaggacggagcggcggcggcagcagtttattcgcgcgctgctgcagcaccaccgccctatcctgatgcacgattatgactctacccccatgtaggcgtggacttctccttcgccgcccgttaagcaaccgcaagttggacagcagcctgtggctcagcagctggacagcgacatgaacttaagtgagctgcccggggagtttattaatatcactgatgagcgtttggctcgacaggaaaccgtgtggaatataacacctaagaatatgtctgttacccatgatatgatgctttttaaggccagccggggagaaaggactgtgtactctgtgtgttgggagggaggtggcaggttgaatactagggttctgtgagtttgattaaggtacggtgatctgtataagctatgtggtggtggggctatactactgaatgaaaaatgacttgaaattttctgcaattgaaaaataaacacgttgaaacataacacaaacgattctttattcttgggcaatgtatgaaaaagtgtaagaggatgtggcaaatatttcattaatgtagttgtggccagaccagtcccatgaaaatgacatagagtatgcacttggagttgtgtctcctgtttcctgtgtaccgtttagtgtaatggttagtgttacaggtttagttttgtctccgtttaagtaaacttgactgacaatgttacttttggcagttttaccgtgagattttggataagctgataggttaggcataaatccaacagcgtttgtataggctgtcgcccctcctgacgcggtaggaggaggggagggtgccctgcatgtctgccgctgctcttgctcttgccgctgctgaggaggggggcgcatctgccgcagcaccggatgcatctgggaaaagcaaaaaaggggctcgtccctgtttccggaggaatttgcaagcggggtcttgcatgacggggaggcaaacccccgttcgccgcagtccggccggtccgagactcgaaccgggggtcccgcgactcaacccttggaaaataaccctccggctacagggagcgagccacttaatgctttcgctttccagcctaaccgcttacgctgcgcgcggccagtggccaaaaaagctagcgcagcagccgccgcgcctggaaggaagccaaaaggagcactcccccgttgtctgacgtcgcacacctgggttcgacacgcgggcggtaaccgcatggatcacggcggacggccggatacggggctcgaaccccggtcgtccgccatgatacccttgcgaatttatccaccagaccacggaagagtgcccgcttacaggctctccttttgcacggtctagagcgtcaacgattgcgcgcgcctgaccggccagagcgtcccgaccatggagcactttttgccgctgcgcaacatctggaaccgcgtccgcgactttccgcgcgcctccaccaccgccgccggcatcacctggatgtccaggtacatctacggatatggcaaacagctattatgggtattatgggtgcggccgcggatcccgggcccgtcgactgcagaggcctgcatgcaagcttggtgtaatcatggtcatagctgtttcctgtgtgaaattgttatccgctcacaattccacacaacatacgagccggaaggtcctgtattagaggtcacgtgagtgttttgcgacattttgcgacaccatgtggtcacgctgggtatttaagcccgagtgagcacgcagggtctccattttgaagcgggaggtttgaacgcgcagccgccaagcataaagtgtaaagcctggggtgcctaatgagtgagctaactcacattaattgcgttgcgctcactgcccgctttccagtcgggaaacctgtcgtgccagctgcattaatgaatcggccaacgcgcggggagaggcggtttgcgtattgggcgctcttccgcttcctcgctcactgactcgctgcgctcggtcgttcggctgcggcgagcggtatcagctcactcaaaggcggtaatacggttatccacagaatcaggggataacgcaggaaagaacatgtgagcaaaaggccagcaaaaggccaggaaccgtaaaaaggccgcgttgctggcgtttttccataggctccgcccccctgacgagcatcacaaaaatcgacgctcaagtcagaggtggcgaaacccgacaggactataaagataccaggcgtttccccctggaagctccctcgtgcgctctcctgttccgaccctgccgcttaccggatacctgtccgcctttctcccttcgggaagcgtggcgctttctcatagctcacgctgtaggtatctcagttcggtgtaggtcgttcgctccaagctgggctgtgtgcacgaaccccccgttcagcccgaccgctgcgccttatccggtaactatcgtcttgagtccaacccggtaagacacgacttatcgccactggcagcagccactggtaacaggattagcagagcgaggtatgtaggcggtgctacagagttcttgaagtggtggcctaactacggctacactagaagaacagtatttggtatctgcgctctgctgaagccagttaccttcggaaaaagagttggtagctcttgatccggcaaacaaaccaccgctggtagcggtggtttttttgtttgcaagcagcagattacgcgcagaaaaaaaggatctcaagaagatcctttgatcttttctacggggtctgacgctcagtggaacgaaaactcacgttaagggattttggtcatgagattatcaaaaaggatcttcacctagatccttttaaattaaaaatgaagttttaaatcaagcccaatctgaataatgttacaaccaattaaccaattctgattagaaaaactcatcgagcatcaaatgaaactgcaatttattcatatcaggattatcaataccatatttttgaaaaagccgtttctgtaatgaaggagaaaactcaccgaggcagttccataggatggcaagatcctggtatcggtctgcgattccgactcgtccaacatcaatacaacctattaatttcccctcgtcaaaaataaggttatcaagtgagaaatcaccatgagtgacgactgaatccggtgagaatggcaaaagtttatgcatttctttccagacttgttcaacaggccagccattacgctcgtcatcaaaatcactcgcatcaaccaaaccgttattcattcgtgattgcgcctgagcgagacgaaatacgcgatcgctgttaaaaggacaattacaaacaggaatcgaatgcaaccggcgcaggaacactgccagcgcatcaacaatattttcacctgaatcaggatattcttctaatacctggaatgctgtttttccggggatcgcagtggtgagtaaccatgcatcatcaggagtacggataaaatgcttgatggtcggaagaggcataaattccgtcagccagtttagtctgaccatctcatctgtaacatcattggcaacgctacctttgccatgtttcagaaacaactctggcgcatcgggcttcccatacaagcgatagattgtcgcacctgattgcccgacattatcgcgagcccatttatacccatataaatcagcatccatgttggaatttaatcgcggcctcgacgtttcccgttgaatatggctcataacaccccttgtattactgtttatgtaagcagacagttttattgttcatgatgatatatttttatcttgtgcaatgtaacatcagagattttgagacacgggccagagctgca

SEQ ID NO: 99 - DNA, 12582 bp, synthetic construct
  source 1..12582: mol_type = other DNA
tcgcgcgtttcggtgatgacggtgaaaacctctgacacatgcagctcccggagacggtcacagcttgtctgtaagcggatgccgggagcagacaagcccgtcagggcgcgtcagcgggtgttggcgggtgtcggggctggcttaactatgcggcatcagagcagattgtactgagagtgcaccatatgcggtgtgaaataccgcacagatgcgtaaggagaaaataccgcatcaggcgccattcgccattcaggctgcgcaactgttgggaagggcgatcggtgcgggcctcttcgctattacgccagctggcgaaagggggatgtgctgcaaggcgattaagttgggtaacgccagggttttcccagtcacgacgttgtaaaacgacggccagagaattccgcagggtctccattttgaagcgggaggtttgaacgcgcagccgccatgccggggttttacgagattgtgattaaggtccccagcgaccttgacgagcatctgcccggcatttctgacagctttgtgaactgggtggccgagaaggaatgggagttgccgccagattctgacatggatctgaatctgattgagcaggcacccctgaccgtggccgagaagctgcagcgcgactttctgacggaatggcgccgtgtgagtaaggccccggaggctcttttctttgtgcaatttgagaagggagagagctacttccacatgcacgtgctcgtggaaaccaccggggtgaaatccatggttttgggacgtttcctgagtcagattcgcgaaaaactgattcagagaatttaccgcgggatcgagccgactttgccaaactggttcgcggtcacaaagaccagaaatggcgccggaggcgggaacaaggtggtggatgagtgctacatccccaattacttgctccccaaaacccagcctgagctccagtgggcgtggactaatatggaacagtatttaagcgcctgtttgaatctcacggagcgtaaacggttggtggcgcagcatctgacgcacgtgtcgcagacgcaggagcagaacaaagagaatcagaatcccaattctgatgcgccggtgatcagatcaaaaacttcagccaggtacatggagctggtcgggtggctcgtggacaaggggattacctcggagaagcagtggatccaggaggaccaggcctcatacatctccttcaatgcggcctccaactcgcggtcccaaatcaaggctgccttggacaatgcgggaaagattatgagcctgactaaaaccgcccccgactacctggtgggccagcagcccgtggaggacatttccagcaatcggatttataaaattttggaactaaacgggtacgatccccaatatgcggcttccgtctttctgggatgggccacgaaaaagttcggcaagaggaacaccatctggctgtttgggcctgcaactaccgggaagaccaacatcgcggaggccatagcccacactgtgcccttctacgggtgcgtaaactggaccaatgagaactttcccttcaacgactgtgtcgacaagatggtgatctggtgggaggaggggaagatgaccgccaaggtcgtggagtcggccaaagccattctcggaggaagcaaggtgcgcgtggaccagaaatgcaagtcctcggcccagatagacccgactcccgtgatcgtcacctccaacaccaacatgtgcgccgtgattgacgggaactcaacgaccttcgaacaccagcagccgttgcaagaccggatgttcaaatttgaactcacccgccgtctggatcatgactttgggaaggtcaccaagcaggaagtcaaagactttttccggtgggcaaaggatcacgtggttgaggtggagcatgaattctacgtcaaaaagggtggagccaagaaaagacccgcccccagtgacgcagatataagtgagcccaaacgggtgcgcgagtcagttgcgcagccatcgacgtcagacgcggaagcttcgatcaactacgcagacaggtaccaaaacaaatgttctcgtcacgtgggcatgaatctgatgctgtttccctgcagacaatgcgagagaatgaatcagaattcaaatatctgcttcactcacggacagaaagactgtttagagtgctttcccgtgtcagaatctcaacccgtttctgtcgtcaaaaaggcgtatcagaaactgtgctacattcatcatatcatgggaaaggtgccagacgcttgcactgcctgcgatctggtcaatgtggatttggatgactgcatctttgaacaataaatgatttaaatcaggtatggctgccgatggttatcttccagattggctcgaggacaaccttagtgaaggaattcgcgagtggtgggctttgaaacctggagcccctcaacccaaggcaaatcaacaacatcaagacaacgctcgaggtcttgtgcttccgggttacaaataccttggacccggcaacggactcgacaagggggagccggtcaacgcagcagacgcggcggccctcgagcacgacaaggcctacgaccagcagctcaaggccggagacaacccgtacctcaagtacaaccacgccgacgccgagttccaggagcggctcaaagaagatacgtcttttgggggcaacctcgggcgagcagtcttccaggccaaaaagaggcttcttgaacctcttggtctggttgaggaagcggctaagacggctcctggaaagaagaggcctgtagagcagtctcctcaggaaccggactcctccgcgggtattggcaaatcgggtgcacagcccgctaaaaagagactcaatttcggtcagactggcgacacagagtcagtcccagaccctcaaccaatcggagaacctcccgcagccccctcaggtgtgggatctcttacaatggcttcaggtggtggcgcaccagtggcagacaataacgaaggtgccgatggagtgggtagttcctcgggaaattggcattgcgattcccaatggctgggggacagagtcatcaccaccagcacccgaacctgggccctgcccacctacaacaatcacctctacaagcaaatctccaacagcacatctggaggatcttcaaatgacaacgcctacttcggctacagcaccccctgggggtattttgacttcaacagattccactgccacttctcaccacgtgactggcagcgactcatcaacaacaactggggattccggcctaagcgactcaacttcaagctcttcaacattcaggtcaaagaggttacggacaacaatggagtcaagaccatcgccaataaccttaccagcacggtccaggtcttcacggactcagactatcagctcccgtacgtgctcgggtcggctcacgagggctgcctcccgccgttcccagcggacgttttcatgattcctcagtacgggtatctgacgcttaatgatggaagccaggccgtgggtcgttcgtccttttactgcctggaatatttcccgtcgcaaatgctaagaacgggtaacaacttccagttcagctacgagtttgagaacgtacctttccatagcagctacgctcacagccaaagcctggaccgactaatgaatccactcatcgaccaatacttgtactatctctcaaagactattaacggttctggacagaatcaacaaacgctaaaattcagtgtggccggacccagcaacatggctgtccagggaagaaactacatacctggacccagctaccgacaacaacgtgtctcaaccactgtgactcaaaacaacaacagcgaatttgcttggcctggagcttcttcttgggctctcaatggacgtaatagcttgatgaatcctggacctgctatggccagccacaaagaaggagaggaccgtttctttcctttgtctggatctttaatttttggcaaacaaggaactggaagagacaacgtggatgcggacaaagtcatgataaccaacgaagaagaaattaaaactactaacccggtagcaacggagtcctatggacaagtggccacaaaccaccagagtgcccaagcacaggcgcagaccggctgggttcaaaaccaaggaatacttccgggtatggtttggcaggacagagatgtgtacctgcaaggacccatttgggccaaaattcctcacacggacggcaactttcacccttctccgctgatgggagggtttggaatgaagcacccgcctcctcagatcctcatcaaaaacacacctgtacctgcggatcctccaacggccttcaacaaggacaagctgaactctttcatcacccagtattctactggccaagtcagcgtggagatcgagtgggagctgcagaaggaaaacagcaagcgctggaacccggagatccagtacacttccaactattacaagtctaataatgttgaatttgctgttaatactgaaggtgtatatagtgaaccccgccccattggcaccagatacctgactcgtaatctgtaattgcctgttaatcaataaaccggttgattcgtttcagttgaactttggtctctgcgaagggcgaattcgtttaaacctgcaggactagagccgaattctgcatcgcgatagggataacagggtaataaataatgtactagagacactttcaataaaggcaaatgcttttatttgtacactctcgggtgattatttacccccacccttgccgtctgcgccgtttaaaaatcaaaggggttctgccgcgcatcgctatgcgccactggcagggacacgttgcgatactggtgtttagtgctccacttaaactcaggcacaaccatccgcggcagctcggtgaagttttcactccacaggctgcgcaccatcaccaacgcgtttagcaggtcgggcgccgatatcttgaagtcgcagttggggcctccgccctgcgcgcgcgagttgcgatacacagggttgcagcactggaacactatcagcgccgggtggtgcacgctggccagcacgctcttgtcggagatcagatccgcgtccaggtcctccgcgttgctcagggcgaacggagtcaactttggtagctgccttcccaaaaagggcgcgtgcccaggctttgagttgcactcgcaccgtagtggcatcaaaaggtgaccgtgcccggtctgggcgttaggatacagcgcctgcataaaagccttgatctgcttaaaagccacctgagcctttgcgccttcagagaagaacatgccgcaagacttgccggaaaactgattggccggacaggccgcgtcgtgcacgcagcaccttgcgtcggtgttggagatctgcaccacatttcggccccaccggttcttcacgatcttggccttgctagactgctccttcagcgcgcgctgcccgttttcgctcgtcacatccatttcaatcacgtgctccttatttatcataatgcttccgtgtagacacttaagctcgccttcgatctcagcgcagcggtgcagccacaacgcgcagcccgtgggctcgtgatgcttgtaggtcacctctgcaaacgactgcaggtacgcctgcaggaatcgccccatcatcgtcacaaaggtcttgttgctggtgaaggtcagctgcaacccgcggtgctcctcgttcagccaggtcttgcatacggccgccagagcttccacttggtcaggcagtagtttgaagttcgcctttagatcgttatccacgtggtacttgtccatcagcgcgcgcgcagcctccatgcccttctcccacgcagacacgatcggcacactcagcgggttcatcaccgtaatttcactttccgcttcgctgggctcttcctcttcctcttgcgtccgcataccacgcgccactgggtcgtcttcattcagccgccgcactgtgcgcttacctcctttgccatgcttgattagcaccggtgggttgctgaaacccaccatttgtagcgccacatcttctctttcttcctcgctgtccacgattacctctggtgatggcgggcgctcgggcttgggagaagggcgcttctttttcttcttgggcgcaatggccaaatccgccgccgaggtcgatggccgcgggctgggtgtgcgcggcaccagcgcgtcttgtgatgagtcttcctcgtcctcggactcgatacgccgcctcatccgcttttttgggggcgcccggggaggcggcggcgacggggacggggacgacacgtcctccatggttgggggacgtcgcgccgcaccgcgtccgcgctcgggggtggtttcgcgctgctcctcttcccgactggccatttccttctcctataggcagaaaaagatcgttgaaactcactccggggctgtggacgtcggcttaccttcgcaaatttgtacctgaggactaccacgcccacgagattaggttctacgaagaccaatcccgcccgcctaatgcggagcttaccgcctgcgtcattacccagggccacattcttggccaattgcaagccatcaacaaagcccgccaagagtttctgctacgaaagggacggggggtttacttggacccccagtccggcgaggagctcaacccaatccccccgccgccgcagccctatcagcagcagccgcgggcccttgcttcccaggatggcacccaaaaagaagctgcagctgccgccgccacccacggacgaggaggaatactgggacagtcaggcagaggaggttttggacgaggaggaggaggacatgatggaagactgggagagcctagacgaggaagcttccgaggtcgaagaggtgtcagacgaaacaccgtcaccctcggtcgcattcccctcgccggcgccccagaaatcggcaaccggttccagcatggctacaacctccgctcctcaggcgccgccggcactgcccgttcgccgacccaaccgtagatgggacaccactggaaccagggccggtaagtccaagcagccgccgccgttagcccaagagcaacaacagcgccaaggctaccgctcatggcgcgggcacaagaacgccatagttgcttgcttgcaagactgtgggggcaacatctccttcgcccgccgctttcttctctaccatcacggcgtggccttcccccgtaacatcctgcattactaccgtcatctctacagcccatactgcaccggcggcagcggcagcaacagcagcggccacacagaagcaaaggcgaccggatagcaagactctgacaaagcccaagaaatccacagcggcggcagcagcaggaggaggagcgctgcgtctggcgcccaacgaacccgtatcgacccgcgagcttagaaacaggatttttcccactctgtatgctatatttcaacagagcaggggccaagaacaagagctgaaaataaaaaacaggtctctgcgatccctcacccgcagctgcctgtatcacaaaagcgaagatcagcttcggcgcacgctggaagacgcggaggctctcttcagtaaatactgcgcgctgactcttaaggactagtttcgcgccctttctcaaatttaagcgcgaaaactacgtcatctccagcggccacacccggcgccagcacctgttgtcagcgccattttttagggcggagtaacttgtatgtgttgggaattgtagttttcttaaaatgggaagtgacgtaacgtgggaaaacggaagtgacgatttgaggaagttgtgggttttttggctttcgtttctgggcgtaggttcgcgtgcggttttctgggtgttttttgtggactttaaccgttacgtcattttttagtcctatatatactcgctctgcacttggcccttttttacactgtgactgattgagctggtgccgtgtcgagtggtgtttttttaataggttttcttttttactggtaaggctgactgttatgactacgtccggcgttccatttggcatgacactacgaccaacacgatctcggttgtctcggcgcactccgtacagtagggatcgtctacctccttttgagacagaaacccgcgctaccatactggaggatcatccgctgctgcccgaatgtaacactttgacaatgcacaacgtgagttacgtgcgaggtcttccctgcagtgtgggatttacgctgattcaggaatgggttgttccctgggatatggttctaacgcgggaggagcttgtaatcctgaggaagtgtatgcacgtgtgcctgtgttgtgccaacattgatatcatgacgagcatgatgatccatggttacgagtcctgggctctccactgtcattgttccagtcccggttccctgcagtgtatagccggcgggcaggttttggccagctggtttaggatggtggtggatggcgccatgtttaatcagaggtttatatggtaccgggaggtggtgaattacaacatgccaaaagaggtaatgtttatgtccagcgtgtttatgaggggtcgccacttaatctacctgcgcttgtggtatgatggccacgtgggttctgtggtccccgccatgagctttggatacagcgccttgcactgtgggattttgaacaatattgtggtgctgtgctgcagttactgtgctgatttaagtgagatcagggtgcgctgctgtgcccggaggacaaggcgccttatgctgcgggcggtgcgaatcatcgctgaggagaccactgccatgttgtattcctgcaggacggagcggcggcggcagcagtttattcgcgcgctgctgcagcaccaccgccctatcctgatgcacgattatgactctacccccatgtaggcgtggacttctccttcgccgcccgttaagcaaccgcaagttggacagcagcctgtggctcagcagctggacagcgacatgaacttaagtgagctgcccggggagtttattaatatcactgatgagcgtttggctcgacaggaaaccgtgtggaatataacacctaagaatatgtctgttacccatgatatgatgctttttaaggccagccggggagaaaggactgtgtactctgtgtgttgggagggaggtggcaggttgaatactagggttctgtgagtttgattaaggtacggtgatctgtataagctatgtggtggtggggctatactactgaatgaaaaatgacttgaaattttctgcaattgaaaaataaacacgttgaaacataacacaaacgattctttattcttgggcaatgtatgaaaaagtgtaagaggatgtggcaaatatttcattaatgtagttgtggccagaccagtcccatgaaaatgacatagagtatgcacttggagttgtgtctcctgtttcctgtgtaccgtttagtgtaatggttagtgttacaggtttagttttgtctccgtttaagtaaacttgactgacaatgttacttttggcagttttaccgtgagattttggataagctgataggttaggcataaatccaacagcgtttgtataggctgtcgcccctcctgacgcggtaggaggaggggagggtgccctgcatgtctgccgctgctcttgctcttgccgctgctgaggaggggggcgcatctgccgcagcaccggatgcatctgggaaaagcaaaaaaggggctcgtccctgtttccggaggaatttgcaagcggggtcttgcatgacggggaggcaaacccccgttcgccgcagtccggccggtccgagactcgaaccgggggtcccgcgactcaacccttggaaaataaccctccggctacagggagcgagccacttaatgctttcgctttccagcctaaccgcttacgctgcgcgcggccagtggccaaaaaagctagcgcagcagccgccgcgcctggaaggaagccaaaaggagcactcccccgttgtctgacgtcgcacacctgggttcgacacgcgggcggtaaccgcatggatcacggcggacggccggatacggggctcgaaccccggtcgtccgccatgatacccttgcgaatttatccaccagaccacggaagagtgcccgcttacaggctctccttttgcacggtctagagcgtcaacgattgcgcgcgcctgaccggccagagcgtcccgaccatggagcactttttgccgctgcgcaacatctggaaccgcgtccgcgactttccgcgcgcctccaccaccgccgccggcatcacctggatgtccaggtacatctacggatatggcaaacagctattatgggtattatgggtgcggccgcggatcccgggcccgtcgactgcagaggcctgcatgcaagcttggtgtaatcatggtcatagctgtttcctgtgtgaaattgttatccgctcacaattccacacaacatacgagccggaagcataaagtgtaaagcctggggtgcctaatgagtgagctaactcacattaattgcgttgcgctcactgcccgctttccagtcgggaaacctgtcgtgccagctgcattaatgaatcggccaacgcgcggggagaggcggtttgcgtattgggcgctcttccgcttcctcgctcactgactcgctgcgctcggtcgttcggctgcggcgagcggtatcagctcactcaaaggcggtaatacggttatccacagaatcaggggataacgcaggaaagaacatgtgagcaaaaggccagcaaaaggccaggaaccgtaaaaaggccgcgttgctggcgtttttccataggctccgcccccctgacgagcatcacaaaaatcgacgctcaagtcagaggtggcgaaacccgacaggactataaagataccaggcgtttccccctggaagctccctcgtgcgctctcctgttccgaccctgccgcttaccggatacctgtccgcctttctcccttcgggaagcgtggcgctttctcatagctcacgctgtaggtatctcagttcggtgtaggtcgttcgctccaagctgggctgtgtgcacgaaccccccgttcagcccgaccgctgcgccttatccggtaactatcgtcttgagtccaacccggtaagacacgacttatcgccactggcagcagccactggtaacaggattagcagagcgaggtatgtaggcggtgctacagagttcttgaagtggtggcctaactacggctacactagaagaacagtatttggtatctgcgctctgctgaagccagttaccttcggaaaaagagttggtagctcttgatccggcaaacaaaccaccgctggtagcggtggtttttttgtttgcaagcagcagattacgcgcagaaaaaaaggatctcaagaagatcctttgatcttttctacggggtctgacgctcagtggaacgaaaactcacgttaagggattttggtcatgagattatcaaaaaggatcttcacctagaaggtcctgtattagaggtcacgtgagtgttttgcgacattttgcgacaccatgtggtcacgctgggtatttaagcccgagtgagcacgcagggtctccattttgaagcgggaggtttgaacgcgcagccgccatccttttaaattaaaaatgaagttttaaatcaagcccaatctgaataatgttacaaccaattaaccaattctgattagaaaaactcatcgagcatcaaatgaaactgcaatttattcatatcaggattatcaataccatatttttgaaaaagccgtttctgtaatgaaggagaaaactcaccgaggcagttccataggatggcaagatcctggtatcggtctgcgattccgactcgtccaacatcaatacaacctattaatttcccctcgtcaaaaataaggttatcaagtgagaaatcaccatgagtgacgactgaatccggtgagaatggcaaaagtttatgcatttctttccagacttgttcaacaggccagccattacgctcgtcatcaaaatcactcgcatcaaccaaaccgttattcattcgtgattgcgcctgagcgagacgaaatacgcgatcgctgttaaaaggacaattacaaacaggaatcgaatgcaaccggcgcaggaacactgccagcgcatcaacaatattttcacctgaatcaggatattcttctaatacctggaatgctgtttttccggggatcgcagtggtgagtaaccatgcatcatcaggagtacggataaaatgcttgatggtcggaagaggcataaattccgtcagccagtttagtctgaccatctcatctgtaacatcattggcaacgctacctttgccatgtttcagaaacaactctggcgcatcgggcttcccatacaagcgatagattgtcgcacctgattgcccgacattatcgcgagcccatttatacccatataaatcagcatccatgttggaatttaatcgcggcctcgacgtttcccgttgaatatggctcataacaccccttgtattactgtttatgtaagcagacagttttattgttcatgatgatatatttttatcttgtgcaatgtaacatcagagattttgagacacgggccagagctgca

SEQ ID NO: 100 - DNA, 12579 bp, synthetic construct
  source 1..12579: mol_type = other DNA
tcgcgcgtttcggtgatgacggtgaaaacctctgacacatgcagctcccggagacggtcacagcttgtctgtaagcggatgccgggagcagacaagcccgtcagggcgcgtcagcgggtgttggcgggtgtcggggctggcttaactatgcggcatcagagcagattgtactgagagtgcaccatatgcggtgtgaaataccgcacagatgcgtaaggagaaaataccgcatcaggcgccattcgccattcaggctgcgcaactgttgggaagggcgatcggtgcgggcctcttcgctattacgccagctggcgaaagggggatgtgctgcaaggcgattaagttgggtaacgccagggttttcccagtcacgacgttgtaaaacgacggccagagaattccgcagggtctccattttgaagcgggaggtttgaacgcgcagccgccatgccggggttttacgagattgtgattaaggtccccagcgaccttgacgagcatctgcccggcatttctgacagctttgtgaactgggtggccgagaaggaatgggagttgccgccagattctgacatggatctgaatctgattgagcaggcacccctgaccgtggccgagaagctgcagcgcgactttctgacggaatggcgccgtgtgagtaaggccccggaggctcttttctttgtgcaatttgagaagggagagagctacttccacatgcacgtgctcgtggaaaccaccggggtgaaatccatggttttgggacgtttcctgagtcagattcgcgaaaaactgattcagagaatttaccgcgggatcgagccgactttgccaaactggttcgcggtcacaaagaccagaaatggcgccggaggcgggaacaaggtggtggatgagtgctacatccccaattacttgctccccaaaacccagcctgagctccagtgggcgtggactaatatggaacagtatttaagcgcctgtttgaatctcacggagcgtaaacggttggtggcgcagcatctgacgcacgtgtcgcagacgcaggagcagaacaaagagaatcagaatcccaattctgatgcgccggtgatcagatcaaaaacttcagccaggtacatggagctggtcgggtggctcgtggacaaggggattacctcggagaagcagtggatccaggaggaccaggcctcatacatctccttcaatgcggcctccaactcgcggtcccaaatcaaggctgccttggacaatgcgggaaagattatgagcctgactaaaaccgcccccgactacctggtgggccagcagcccgtggaggacatttccagcaatcggatttataaaattttggaactaaacgggtacgatccccaatatgcggcttccgtctttctgggatgggccacgaaaaagttcggcaagaggaacaccatctggctgtttgggcctgcaactaccgggaagaccaacatcgcggaggccatagcccacactgtgcccttctacgggtgcgtaaactggaccaatgagaactttcccttcaacgactgtgtcgacaagatggtgatctggtgggaggaggggaagatgaccgccaaggtcgtggagtcggccaaagccattctcggaggaagcaaggtgcgcgtggaccagaaatgcaagtcctcggcccagatagacccgactcccgtgatcgtcacctccaacaccaacatgtgcgccgtgattgacgggaactcaacgaccttcgaacaccagcagccgttgcaagaccggatgttcaaatttgaactcacccgccgtctggatcatgactttgggaaggtcaccaagcaggaagtcaaagactttttccggtgggcaaaggatcacgtggttgaggtggagcatgaattctacgtcaaaaagggtggagccaagaaaagacccgcccccagtgacgcagatataagtgagcccaaacgggtgcgcgagtcagttgcgcagccatcgacgtcagacgcggaagcttcgatcaactacgcagacaggtaccaaaacaaatgttctcgtcacgtgggcatgaatctgatgctgtttccctgcagacaatgcgagagaatgaatcagaattcaaatatctgcttcactcacggacagaaagactgtttagagtgctttcccgtgtcagaatctcaacccgtttctgtcgtcaaaaaggcgtatcagaaactgtgctacattcatcatatcatgggaaaggtgccagacgcttgcactgcctgcgatctggtcaatgtggatttggatgactgcatctttgaacaataaatgatttaaatcaggtatggctgccgatggttatcttccagattggctcgaggacactctctctgaaggaataagacagtggtggaagctcaaacctggcccaccaccaccaaagcccgcagagcggcataaggacgacagcaggggtcttgtgcttcctgggtacaagtacctcggacccttcaacggactcgacaagggagagccggtcaacgaggcagacgccgcggccctcgagcacgacaaagcctacgaccggcagctcgacagcggagacaacccgtacctcaagtacaaccacgccgacgcggagtttcaggagcgccttaaagaagatacgtcttttgggggcaacctcggacgagcagtcttccaggcgaaaaagagggttcttgaacctctgggcctggttgaggaacctgttaagacggctccgggaaaaaagaggccggtagagcactctcctgtggagccagactcctcctcgggaaccggaaaggcgggccagcagcctgcaagaaaaagattgaattttggtcagactggagacgcagactcagtacctgacccccagcctctcggacagccaccagcagccccctctggtctgggaactaatacgatggctacaggcagtggcgcaccaatggcagacaataacgagggcgccgacggagtgggtaattcctcgggaaattggcattgcgattccacatggatgggcgacagagtcatcaccaccagcacccgaacctgggccctgcccacctacaacaaccacctctacaaacaaatttccagccaatcaggagcctcgaacgacaatcactactttggctacagcaccccttgggggtattttgacttcaacagattccactgccacttttcaccacgtgactggcaaagactcatcaacaacaactggggattccgacccaagagactcaacttcaagctctttaacattcaagtcaaagaggtcacgcagaatgacggtacgacgacgattgccaataaccttaccagcacggttcaggtgtttactgactcggagtaccagctcccgtacgtcctcggctcggcgcatcaaggatgcctcccgccgttcccagcagacgtcttcatggtgccacagtatggatacctcaccctgaacaacgggagtcaggcagtaggacgctcttcattttactgcctggagtactttccttctcagatgctgcgtaccggaaacaactttaccttcagctacacttttgaggacgttcctttccacagcagctacgctcacagccagagtctggaccgtctcatgaatcctctcatcgaccagtacctgtattacttgagcagaacaaacactccaagtggaaccaccacgcagtcaaggcttcagttttctcaggccggagcgagtgacattcgggaccagtctaggaactggcttcctggaccctgttaccgccagcagcgagtatcaaagacatctgcggataacaacaacagtgaatactcgtggactggagctaccaagtaccacctcaatggcagagactctctggtgaatccgggcccggccatggcaagccacaaggacgatgaagaaaagttttttcctcagagcggggttctcatctttgggaagcaaggctcagagaaaacaaatgtggacattgaaaaggtcatgattacagacgaagaggaaatcaggacaaccaatcccgtggctacggagcagtatggttctgtatctaccaacctccagagaggcaacagacaagcagctaccgcagatgtcaacacacaaggcgttcttccaggcatggtctggcaggacagagatgtgtaccttcaggggcccatctgggcaaagattccacacacggacggacattttcacccctctcccctcatgggtggattcggacttaaacaccctcctccacagattctcatcaagaacaccccggtacctgcgaatccttcgaccaccttcagtgcggcaaagtttgcttccttcatcacacagtactccacgggacaggtcagcgtggagatcgagtgggagctgcagaaggaaaacagcaaacgctggaatcccgaaattcagtacacttccaactacaacaagtctgttaatgtggactttactgtggacactaatggcgtgtattcagagcctcgccccattggcaccagatacctgactcgtaatctgtaattgcctgttaatcaataaaccggttgattcgtttcagttgaactttggtctctgcgaagggcgaattcgtttaaacctgcaggactagagccgaattctgcatcgcgatagggataacagggtaataaataatgtactagagacactttcaataaaggcaaatgcttttatttgtacactctcgggtgattatttacccccacccttgccgtctgcgccgtttaaaaatcaaaggggttctgccgcgcatcgctatgcgccactggcagggacacgttgcgatactggtgtttagtgctccacttaaactcaggcacaaccatccgcggcagctcggtgaagttttcactccacaggctgcgcaccatcaccaacgcgtttagcaggtcgggcgccgatatcttgaagtcgcagttggggcctccgccctgcgcgcgcgagttgcgatacacagggttgcagcactggaacactatcagcgccgggtggtgcacgctggccagcacgctcttgtcggagatcagatccgcgtccaggtcctccgcgttgctcagggcgaacggagtcaactttggtagctgccttcccaaaaagggcgcgtgcccaggctttgagttgcactcgcaccgtagtggcatcaaaaggtgaccgtgcccggtctgggcgttaggatacagcgcctgcataaaagccttgatctgcttaaaagccacctgagcctttgcgccttcagagaagaacatgccgcaagacttgccggaaaactgattggccggacaggccgcgtcgtgcacgcagcaccttgcgtcggtgttggagatctgcaccacatttcggccccaccggttcttcacgatcttggccttgctagactgctccttcagcgcgcgctgcccgttttcgctcgtcacatccatttcaatcacgtgctccttatttatcataatgcttccgtgtagacacttaagctcgccttcgatctcagcgcagcggtgcagccacaacgcgcagcccgtgggctcgtgatgcttgtaggtcacctctgcaaacgactgcaggtacgcctgcaggaatcgccccatcatcgtcacaaaggtcttgttgctggtgaaggtcagctgcaacccgcggtgctcctcgttcagccaggtcttgcatacggccgccagagcttccacttggtcaggcagtagtttgaagttcgcctttagatcgttatccacgtggtacttgtccatcagcgcgcgcgcagcctccatgcccttctcccacgcagacacgatcggcacactcagcgggttcatcaccgtaatttcactttccgcttcgctgggctcttcctcttcctcttgcgtccgcataccacgcgccactgggtcgtcttcattcagccgccgcactgtgcgcttacctcctttgccatgcttgattagcaccggtgggttgctgaaacccaccatttgtagcgccacatcttctctttcttcctcgctgtccacgattacctctggtgatggcgggcgctcgggcttgggagaagggcgcttctttttcttcttgggcgcaatggccaaatccgccgccgaggtcgatggccgcgggctgggtgtgcgcggcaccagcgcgtcttgtgatgagtcttcctcgtcctcggactcgatacgccgcctcatccgcttttttgggggcgcccggggaggcggcggcgacggggacggggacgacacgtcctccatggttgggggacgtcgcgccgcaccgcgtccgcgctcgggggtggtttcgcgctgctcctcttcccgactggccatttccttctcctataggcagaaaaagatcgttgaaactcactccggggctgtggacgtcggcttaccttcgcaaatttgtacctgaggactaccacgcccacgagattaggttctacgaagaccaatcccgcccgcctaatgcggagcttaccgcctgcgtcattacccagggccacattcttggccaattgcaagccatcaacaaagcccgccaagagtttctgctacgaaagggacggggggtttacttggacccccagtccggcgaggagctcaacccaatccccccgccgccgcagccctatcagcagcagccgcgggcccttgcttcccaggatggcacccaaaaagaagctgcagctgccgccgccacccacggacgaggaggaatactgggacagtcaggcagaggaggttttggacgaggaggaggaggacatgatggaagactgggagagcctagacgaggaagcttccgaggtcgaagaggtgtcagacgaaacaccgtcaccctcggtcgcattcccctcgccggcgccccagaaatcggcaaccggttccagcatggctacaacctccgctcctcaggcgccgccggcactgcccgttcgccgacccaaccgtagatgggacaccactggaaccagggccggtaagtccaagcagccgccgccgttagcccaagagcaacaacagcgccaaggctaccgctcatggcgcgggcacaagaacgccatagttgcttgcttgcaagactgtgggggcaacatctccttcgcccgccgctttcttctctaccatcacggcgtggccttcccccgtaacatcctgcattactaccgtcatctctacagcccatactgcaccggcggcagcggcagcaacagcagcggccacacagaagcaaaggcgaccggatagcaagactctgacaaagcccaagaaatccacagcggcggcagcagcaggaggaggagcgctgcgtctggcgcccaacgaacccgtatcgacccgcgagcttagaaacaggatttttcccactctgtatgctatatttcaacagagcaggggccaagaacaagagctgaaaataaaaaacaggtctctgcgatccctcacccgcagctgcctgtatcacaaaagcgaagatcagcttcggcgcacgctggaagacgcggaggctctcttcagtaaatactgcgcgctgactcttaaggactagtttcgcgccctttctcaaatttaagcgcgaaaactacgtcatctccagcggccacacccggcgccagcacctgttgtcagcgccattttttagggcggagtaacttgtatgtgttgggaattgtagttttcttaaaatgggaagtgacgtaacgtgggaaaacggaagtgacgatttgaggaagttgtgggttttttggctttcgtttctgggcgtaggttcgcgtgcggttttctgggtgttttttgtggactttaaccgttacgtcattttttagtcctatatatactcgctctgcacttggcccttttttacactgtgactgattgagctggtgccgtgtcgagtggtgtttttttaataggttttcttttttactggtaaggctgactgttatgactacgtccggcgttccatttggcatgacactacgaccaacacgatctcggttgtctcggcgcactccgtacagtagggatcgtctacctccttttgagacagaaacccgcgctaccatactggaggatcatccgctgctgcccgaatgtaacactttgacaatgcacaacgtgagttacgtgcgaggtcttccctgcagtgtgggatttacgctgattcaggaatgggttgttccctgggatatggttctaacgcgggaggagcttgtaatcctgaggaagtgtatgcacgtgtgcctgtgttgtgccaacattgatatcatgacgagcatgatgatccatggttacgagtcctgggctctccactgtcattgttccagtcccggttccctgcagtgtatagccggcgggcaggttttggccagctggtttaggatggtggtggatggcgccatgtttaatcagaggtttatatggtaccgggaggtggtgaattacaacatgccaaaagaggtaatgtttatgtccagcgtgtttatgaggggtcgccacttaatctacctgcgcttgtggtatgatggccacgtgggttctgtggtccccgccatgagctttggatacagcgccttgcactgtgggattttgaacaatattgtggtgctgtgctgcagttactgtgctgatttaagtgagatcagggtgcgctgctgtgcccggaggacaaggcgccttatgctgcgggcggtgcgaatcatcgctgaggagaccactgccatgttgtattcctgcaggacggagcggcggcggcagcagtttattcgcgcgctgctgcagcaccaccgccctatcctgatgcacgattatgactctacccccatgtaggcgtggacttctccttcgccgcccgttaagcaaccgcaagttggacagcagcctgtggctcagcagctggacagcgacatgaacttaagtgagctgcccggggagtttattaatatcactgatgagcgtttggctcgacaggaaaccgtgtggaatataacacctaagaatatgtctgttacccatgatatgatgctttttaaggccagccggggagaaaggactgtgtactctgtgtgttgggagggaggtggcaggttgaatactagggttctgtgagtttgattaaggtacggtgatctgtataagctatgtggtggtggggctatactactgaatgaaaaatgacttgaaattttctgcaattgaaaaataaacacgttgaaacataacacaaacgattctttattcttgggcaatgtatgaaaaagtgtaagaggatgtggcaaatatttcattaatgtagttgtggccagaccagtcccatgaaaatgacatagagtatgcacttggagttgtgtctcctgtttcctgtgtaccgtttagtgtaatggttagtgttacaggtttagttttgtctccgtttaagtaaacttgactgacaatgttacttttggcagttttaccgtgagattttggataagctgataggttaggcataaatccaacagcgtttgtataggctgtcgcccctcctgacgcggtaggaggaggggagggtgccctgcatgtctgccgctgctcttgctcttgccgctgctgaggaggggggcgcatctgccgcagcaccggatgcatctgggaaaagcaaaaaaggggctcgtccctgtttccggaggaatttgcaagcggggtcttgcatgacggggaggcaaacccccgttcgccgcagtccggccggtccgagactcgaaccgggggtcccgcgactcaacccttggaaaataaccctccggctacagggagcgagccacttaatgctttcgctttccagcctaaccgcttacgctgcgcgcggccagtggccaaaaaagctagcgcagcagccgccgcgcctggaaggaagccaaaaggagcactcccccgttgtctgacgtcgcacacctgggttcgacacgcgggcggtaaccgcatggatcacggcggacggccggatacggggctcgaaccccggtcgtccgccatgatacccttgcgaatttatccaccagaccacggaagagtgcccgcttacaggctctccttttgcacggtctagagcgtcaacgattgcgcgcgcctgaccggccagagcgtcccgaccatggagcactttttgccgctgcgcaacatctggaaccgcgtccgcgactttccgcgcgcctccaccaccgccgccggcatcacctggatgtccaggtacatctacggatatggcaaacagctattatgggtattatgggtgcggccgcggatcccgggcccgtcgactgcagaggcctgcatgcaagcttggtgtaatcatggtcatagctgtttcctgtgtgaaattgttatccgctcacaattccacacaacatacgagccggaagcataaagtgtaaagcctggggtgcctaatgagtgagctaactcacattaattgcgttgcgctcactgcccgctttccagtcgggaaacctgtcgtgccagctgcattaatgaatcggccaacgcgcggggagaggcggtttgcgtattgggcgctcttccgcttcctcgctcactgactcgctgcgctcggtcgttcggctgcggcgagcggtatcagctcactcaaaggcggtaatacggttatccacagaatcaggggataacgcaggaaagaacatgtgagcaaaaggccagcaaaaggccaggaaccgtaaaaaggccgcgttgctggcgtttttccataggctccgcccccctgacgagcatcacaaaaatcgacgctcaagtcagaggtggcgaaacccgacaggactataaagataccaggcgtttccccctggaagctccctcgtgcgctctcctgttccgaccctgccgcttaccggatacctgtccgcctttctcccttcgggaagcgtggcgctttctcatagctcacgctgtaggtatctcagttcggtgtaggtcgttcgctccaagctgggctgtgtgcacgaaccccccgttcagcccgaccgctgcgccttatccggtaactatcgtcttgagtccaacccggtaagacacgacttatcgccactggcagcagccactggtaacaggattagcagagcgaggtatgtaggcggtgctacagagttcttgaagtggtggcctaactacggctacactagaagaacagtatttggtatctgcgctctgctgaagccagttaccttcggaaaaagagttggtagctcttgatccggcaaacaaaccaccgctggtagcggtggtttttttgtttgcaagcagcagattacgcgcagaaaaaaaggatctcaagaagatcctttgatcttttctacggggtctgacgctcagtggaacgaaaactcacgttaagggattttggtcatgagattatcaaaaaggatcttcacctagaaggtcctgtattagaggtcacgtgagtgttttgcgacattttgcgacaccatgtggtcacgctgggtatttaagcccgagtgagcacgcagggtctccattttgaagcgggaggtttgaacgcgcagccgccatccttttaaattaaaaatgaagttttaaatcaagcccaatctgaataatgttacaaccaattaaccaattctgattagaaaaactcatcgagcatcaaatgaaactgcaatttattcatatcaggattatcaataccatatttttgaaaaagccgtttctgtaatgaaggagaaaactcaccgaggcagttccataggatggcaagatcctggtatcggtctgcgattccgactcgtccaacatcaatacaacctattaatttcccctcgtcaaaaataaggttatcaagtgagaaatcaccatgagtgacgactgaatccggtgagaatggcaaaagtttatgcatttctttccagacttgttcaacaggccagccattacgctcgtcatcaaaatcactcgcatcaaccaaaccgttattcattcgtgattgcgcctgagcgagacgaaatacgcgatcgctgttaaaaggacaattacaaacaggaatcgaatgcaaccggcgcaggaacactgccagcgcatcaacaatattttcacctgaatcaggatattcttctaatacctggaatgctgtttttccggggatcgcagtggtgagtaaccatgcatcatcaggagtacggataaaatgcttgatggtcggaagaggcataaattccgtcagccagtttagtctgaccatctcatctgtaacatcattggcaacgctacctttgccatgtttcagaaacaactctggcgcatcgggcttcccatacaagcgatagattgtcgcacctgattgcccgacattatcgcgagcccatttatacccatataaatcagcatccatgttggaatttaatcgcggcctcgacgtttcccgttgaatatggctcataacaccccttgtattactgtttatgtaagcagacagttttattgttcatgatgatatatttttatcttgtgcaatgtaacatcagagattttgagacacgggccagagctgca

SEQ ID NO: 101 - DNA, 12582 bp, synthetic construct
  source 1..12582: mol_type = other DNA
tcgcgcgtttcggtgatgacggtgaaaacctctgacacatgcagctcccggagacggtcacagcttgtctgtaagcggatgccgggagcagacaagcccgtcagggcgcgtcagcgggtgttggcgggtgtcggggctggcttaactatgcggcatcagagcagattgtactgagagtgcaccatatgcggtgtgaaataccgcacagatgcgtaaggagaaaataccgcatcaggcgccattcgccattcaggctgcgcaactgttgggaagggcgatcggtgcgggcctcttcgctattacgccagctggcgaaagggggatgtgctgcaaggcgattaagttgggtaacgccagggttttcccagtcacgacgttgtaaaacgacggccagagaattccgcagggtctccattttgaagcgggaggtttgaacgcgcagccgccatgccggggttttacgagattgtgattaaggtccccagcgaccttgacgagcatctgcccggcatttctgacagctttgtgaactgggtggccgagaaggaatgggagttgccgccagattctgacatggatctgaatctgattgagcaggcacccctgaccgtggccgagaagctgcagcgcgactttctgacggaatggcgccgtgtgagtaaggccccggaggctcttttctttgtgcaatttgagaagggagagagctacttccacatgcacgtgctcgtggaaaccaccggggtgaaatccatggttttgggacgtttcctgagtcagattcgcgaaaaactgattcagagaatttaccgcgggatcgagccgactttgccaaactggttcgcggtcacaaagaccagaaatggcgccggaggcgggaacaaggtggtggatgagtgctacatccccaattacttgctccccaaaacccagcctgagctccagtgggcgtggactaatatggaacagtatttaagcgcctgtttgaatctcacggagcgtaaacggttggtggcgcagcatctgacgcacgtgtcgcagacgcaggagcagaacaaagagaatcagaatcccaattctgatgcgccggtgatcagatcaaaaacttcagccaggtacatggagctggtcgggtggctcgtggacaaggggattacctcggagaagcagtggatccaggaggaccaggcctcatacatctccttcaatgcggcctccaactcgcggtcccaaatcaaggctgccttggacaatgcgggaaagattatgagcctgactaaaaccgcccccgactacctggtgggccagcagcccgtggaggacatttccagcaatcggatttataaaattttggaactaaacgggtacgatccccaatatgcggcttccgtctttctgggatgggccacgaaaaagttcggcaagaggaacaccatctggctgtttgggcctgcaactaccgggaagaccaacatcgcggaggccatagcccacactgtgcccttctacgggtgcgtaaactggaccaatgagaactttcccttcaacgactgtgtcgacaagatggtgatctggtgggaggaggggaagatgaccgccaaggtcgtggagtcggccaaagccattctcggaggaagcaaggtgcgcgtggaccagaaatgcaagtcctcggcccagatagacccgactcccgtgatcgtcacctccaacaccaacatgtgcgccgtgattgacgggaactcaacgaccttcgaacaccagcagccgttgcaagaccggatgttcaaatttgaactcacccgccgtctggatcatgactttgggaaggtcaccaagcaggaagtcaaagactttttccggtgggcaaaggatcacgtggttgaggtggagcatgaattctacgtcaaaaagggtggagccaagaaaagacccgcccccagtgacgcagatataagtgagcccaaacgggtgcgcgagtcagttgcgcagccatcgacgtcagacgcggaagcttcgatcaactacgcagacaggtaccaaaacaaatgttctcgtcacgtgggcatgaatctgatgctgtttccctgcagacaatgcgagagaatgaatcagaattcaaatatctgcttcactcacggacagaaagactgtttagagtgctttcccgtgtcagaatctcaacccgtttctgtcgtcaaaaaggcgtatcagaaactgtgctacattcatcatatcatgggaaaggtgccagacgcttgcactgcctgcgatctggtcaatgtggatttggatgactgcatctttgaacaataaatgatttaaatcaggtatggctgccgatggttatcttccagattggctcgaggacaacctctctgagggcattcgcgagtggtgggacttgaaacctggagccccgaaacccaaagccaaccagcaaaagcaggacgacggccggggtctggtgcttcctggctacaagtacctcggacccttcaacggactcgacaagggggagcccgtcaacgcggcggatgcagcggccctcgagcacgacaaggcctacgaccagcagctcaaagcgggtgacaatccgtacctgcggtataaccacgccgacgccgagtttcaggagcgtctgcaagaagatacgtcttttgggggcaacctcgggcgagcagtcttccaggccaagaagagggttctcgaaccttttggtctggttgaggaaggtgctaagacggctcctggaaagaaacgtccggtagagcagtcgccacaagagccagactcctcctcgggcattggcaagacaggccagcagcccgctaaaaagagactcaattttggtcagactggcgactcagagtcagtccccgacccacaacctctcggagaacctccagcaacccccgctgctgtgggacctactacaatggcttcaggcggtggcgcaccaatggcagacaataacgaaggcgccgacggagtgggtaatgcctcaggaaattggcattgcgattccacatggctgggcgacagagtcatcaccaccagcacccgaacatgggccttgcccacctataacaaccacctctacaagcaaatctccagtgcttcaacgggggccagcaacgacaaccactacttcggctacagcaccccctgggggtattttgatttcaacagattccactgccatttctcaccacgtgactggcagcgactcatcaacaacaattggggattccggcccaagagactcaacttcaagctcttcaacatccaagtcaaggaggtcacgacgaatgatggcgtcacgaccatcgctaataaccttaccagcacggttcaagtcttctcggactcggagtaccagttgccgtacgtcctcggctctgcgcaccagggctgcctccctccgttcccggcggacgtgttcatgattccgcagtacggctacctaacgctcaacaatggcagccaggcagtgggacggtcatccttttactgcctggaatatttcccatcgcagatgctgagaacgggcaataactttaccttcagctacaccttcgaggacgtgcctttccacagcagctacgcgcacagccagagcctggaccggctgatgaatcctctcatcgaccagtacctgtattacctgaacagaactcagaatcagtccggaagtgcccaaaacaaggacttgctgtttagccgggggtctccagctggcatgtctgttcagcccaaaaactggctacctggaccctgttaccggcagcagcgcgtttctaaaacaaaaacagacaacaacaacagcaactttacctggactggtgcttcaaaatataaccttaatgggcgtgaatctataatcaaccctggcactgctatggcctcacacaaagacgacaaagacaagttctttcccatgagcggtgtcatgatttttggaaaggagagcgccggagcttcaaacactgcattggacaatgtcatgatcacagacgaagaggaaatcaaagccactaaccccgtggccaccgaaagatttgggactgtggcagtcaatctccagagcagcagcacagaccctgcgaccggagatgtgcatgttatgggagccttacctggaatggtgtggcaagacagagacgtatacctgcagggtcctatttgggccaaaattcctcacacggatggacactttcacccgtctcctctcatgggcggctttggacttaagcacccgcctcctcagatcctcatcaaaaacacgcctgttcctgcgaatcctccggcagagttttcggctacaaagtttgcttcattcatcacccagtattccacaggacaagtgagcgtggagattgaatgggagctgcagaaagaaaacagcaaacgctggaatcccgaagtgcagtatacatctaactatgcaaaatctgccaacgttgatttcactgtggacaacaatggactttatactgagcctcgccccattggcacccgttacctcacccgtcccctgtaattgcctgttaatcaataaaccggttgattcgtttcagttgaactttggtctctgcgaagggcgaattcgtttaaacctgcaggactagagccgaattctgcatcgcgatagggataacagggtaataaataatgtactagagacactttcaataaaggcaaatgcttttatttgtacactctcgggtgattatttacccccacccttgccgtctgcgccgtttaaaaatcaaaggggttctgccgcgcatcgctatgcgccactggcagggacacgttgcgatactggtgtttagtgctccacttaaactcaggcacaaccatccgcggcagctcggtgaagttttcactccacaggctgcgcaccatcaccaacgcgtttagcaggtcgggcgccgatatcttgaagtcgcagttggggcctccgccctgcgcgcgcgagttgcgatacacagggttgcagcactggaacactatcagcgccgggtggtgcacgctggccagcacgctcttgtcggagatcagatccgcgtccaggtcctccgcgttgctcagggcgaacggagtcaactttggtagctgccttcccaaaaagggcgcgtgcccaggctttgagttgcactcgcaccgtagtggcatcaaaaggtgaccgtgcccggtctgggcgttaggatacagcgcctgcataaaagccttgatctgcttaaaagccacctgagcctttgcgccttcagagaagaacatgccgcaagacttgccggaaaactgattggccggacaggccgcgtcgtgcacgcagcaccttgcgtcggtgttggagatctgcaccacatttcggccccaccggttcttcacgatcttggccttgctagactgctccttcagcgcgcgctgcccgttttcgctcgtcacatccatttcaatcacgtgctccttatttatcataatgcttccgtgtagacacttaagctcgccttcgatctcagcgcagcggtgcagccacaacgcgcagcccgtgggctcgtgatgcttgtaggtcacctctgcaaacgactgcaggtacgcctgcaggaatcgccccatcatcgtcacaaaggtcttgttgctggtgaaggtcagctgcaacccgcggtgctcctcgttcagccaggtcttgcatacggccgccagagcttccacttggtcaggcagtagtttgaagttcgcctttagatcgttatccacgtggtacttgtccatcagcgcgcgcgcagcctccatgcccttctcccacgcagacacgatcggcacactcagcgggttcatcaccgtaatttcactttccgcttcgctgggctcttcctcttcctcttgcgtccgcataccacgcgccactgggtcgtcttcattcagccgccgcactgtgcgcttacctcctttgccatgcttgattagcaccggtgggttgctgaaacccaccatttgtagcgccacatcttctctttcttcctcgctgtccacgattacctctggtgatggcgggcgctcgggcttgggagaagggcgcttctttttcttcttgggcgcaatggccaaatccgccgccgaggtcgatggccgcgggctgggtgtgcgcggcaccagcgcgtcttgtgatgagtcttcctcgtcctcggactcgatacgccgcctcatccgcttttttgggggcgcccggggaggcggcggcgacggggacggggacgacacgtcctccatggttgggggacgtcgcgccgcaccgcgtccgcgctcgggggtggtttcgcgctgctcctcttcccgactggccatttccttctcctataggcagaaaaagatcgttgaaactcactccggggctgtggacgtcggcttaccttcgcaaatttgtacctgaggactaccacgcccacgagattaggttctacgaagaccaatcccgcccgcctaatgcggagcttaccgcctgcgtcattacccagggccacattcttggccaattgcaagccatcaacaaagcccgccaagagtttctgctacgaaagggacggggggtttacttggacccccagtccggcgaggagctcaacccaatccccccgccgccgcagccctatcagcagcagccgcgggcccttgcttcccaggatggcacccaaaaagaagctgcagctgccgccgccacccacggacgaggaggaatactgggacagtcaggcagaggaggttttggacgaggaggaggaggacatgatggaagactgggagagcctagacgaggaagcttccgaggtcgaagaggtgtcagacgaaacaccgtcaccctcggtcgcattcccctcgccggcgccccagaaatcggcaaccggttccagcatggctacaacctccgctcctcaggcgccgccggcactgcccgttcgccgacccaaccgtagatgggacaccactggaaccagggccggtaagtccaagcagccgccgccgttagcccaagagcaacaacagcgccaaggctaccgctcatggcgcgggcacaagaacgccatagttgcttgcttgcaagactgtgggggcaacatctccttcgcccgccgctttcttctctaccatcacggcgtggccttcccccgtaacatcctgcattactaccgtcatctctacagcccatactgcaccggcggcagcggcagcaacagcagcggccacacagaagcaaaggcgaccggatagcaagactctgacaaagcccaagaaatccacagcggcggcagcagcaggaggaggagcgctgcgtctggcgcccaacgaacccgtatcgacccgcgagcttagaaacaggatttttcccactctgtatgctatatttcaacagagcaggggccaagaacaagagctgaaaataaaaaacaggtctctgcgatccctcacccgcagctgcctgtatcacaaaagcgaagatcagcttcggcgcacgctggaagacgcggaggctctcttcagtaaatactgcgcgctgactcttaaggactagtttcgcgccctttctcaaatttaagcgcgaaaactacgtcatctccagcggccacacccggcgccagcacctgttgtcagcgccattttttagggcggagtaacttgtatgtgttgggaattgtagttttcttaaaatgggaagtgacgtaacgtgggaaaacggaagtgacgatttgaggaagttgtgggttttttggctttcgtttctgggcgtaggttcgcgtgcggttttctgggtgttttttgtggactttaaccgttacgtcattttttagtcctatatatactcgctctgcacttggcccttttttacactgtgactgattgagctggtgccgtgtcgagtggtgtttttttaataggttttcttttttactggtaaggctgactgttatgactacgtccggcgttccatttggcatgacactacgaccaacacgatctcggttgtctcggcgcactccgtacagtagggatcgtctacctccttttgagacagaaacccgcgctaccatactggaggatcatccgctgctgcccgaatgtaacactttgacaatgcacaacgtgagttacgtgcgaggtcttccctgcagtgtgggatttacgctgattcaggaatgggttgttccctgggatatggttctaacgcgggaggagcttgtaatcctgaggaagtgtatgcacgtgtgcctgtgttgtgccaacattgatatcatgacgagcatgatgatccatggttacgagtcctgggctctccactgtcattgttccagtcccggttccctgcagtgtatagccggcgggcaggttttggccagctggtttaggatggtggtggatggcgccatgtttaatcagaggtttatatggtaccgggaggtggtgaattacaacatgccaaaagaggtaatgtttatgtccagcgtgtttatgaggggtcgccacttaatctacctgcgcttgtggtatgatggccacgtgggttctgtggtccccgccatgagctttggatacagcgccttgcactgtgggattttgaacaatattgtggtgctgtgctgcagttactgtgctgatttaagtgagatcagggtgcgctgctgtgcccggaggacaaggcgccttatgctgcgggcggtgcgaatcatcgctgaggagaccactgccatgttgtattcctgcaggacggagcggcggcggcagcagtttattcgcgcgctgctgcagcaccaccgccctatcctgatgcacgattatgactctacccccatgtaggcgtggacttctccttcgccgcccgttaagcaaccgcaagttggacagcagcctgtggctcagcagctggacagcgacatgaacttaagtgagctgcccggggagtttattaatatcactgatgagcgtttggctcgacaggaaaccgtgtggaatataacacctaagaatatgtctgttacccatgatatgatgctttttaaggccagccggggagaaaggactgtgtactctgtgtgttgggagggaggtggcaggttgaatactagggttctgtgagtttgattaaggtacggtgatctgtataagctatgtggtggtggggctatactactgaatgaaaaatgacttgaaattttctgcaattgaaaaataaacacgttgaaacataacacaaacgattctttattcttgggcaatgtatgaaaaagtgtaagaggatgtggcaaatatttcattaatgtagttgtggccagaccagtcccatgaaaatgacatagagtatgcacttggagttgtgtctcctgtttcctgtgtaccgtttagtgtaatggttagtgttacaggtttagttttgtctccgtttaagtaaacttgactgacaatgttacttttggcagttttaccgtgagattttggataagctgataggttaggcataaatccaacagcgtttgtataggctgtcgcccctcctgacgcggtaggaggaggggagggtgccctgcatgtctgccgctgctcttgctcttgccgctgctgaggaggggggcgcatctgccgcagcaccggatgcatctgggaaaagcaaaaaaggggctcgtccctgtttccggaggaatttgcaagcggggtcttgcatgacggggaggcaaacccccgttcgccgcagtccggccggtccgagactcgaaccgggggtcccgcgactcaacccttggaaaataaccctccggctacagggagcgagccacttaatgctttcgctttccagcctaaccgcttacgctgcgcgcggccagtggccaaaaaagctagcgcagcagccgccgcgcctggaaggaagccaaaaggagcactcccccgttgtctgacgtcgcacacctgggttcgacacgcgggcggtaaccgcatggatcacggcggacggccggatacggggctcgaaccccggtcgtccgccatgatacccttgcgaatttatccaccagaccacggaagagtgcccgcttacaggctctccttttgcacggtctagagcgtcaacgattgcgcgcgcctgaccggccagagcgtcccgaccatggagcactttttgccgctgcgcaacatctggaaccgcgtccgcgactttccgcgcgcctccaccaccgccgccggcatcacctggatgtccaggtacatctacggatatggcaaacagctattatgggtattatgggtgcggccgcggatcccgggcccgtcgactgcagaggcctgcatgcaagcttggtgtaatcatggtcatagctgtttcctgtgtgaaattgttatccgctcacaattccacacaacatacgagccggaagcataaagtgtaaagcctggggtgcctaatgagtgagctaactcacattaattgcgttgcgctcactgcccgctttccagtcgggaaacctgtcgtgccagctgcattaatgaatcggccaacgcgcggggagaggcggtttgcgtattgggcgctcttccgcttcctcgctcactgactcgctgcgctcggtcgttcggctgcggcgagcggtatcagctcactcaaaggcggtaatacggttatccacagaatcaggggataacgcaggaaagaacatgtgagcaaaaggccagcaaaaggccaggaaccgtaaaaaggccgcgttgctggcgtttttccataggctccgcccccctgacgagcatcacaaaaatcgacgctcaagtcagaggtggcgaaacccgacaggactataaagataccaggcgtttccccctggaagctccctcgtgcgctctcctgttccgaccctgccgcttaccggatacctgtccgcctttctcccttcgggaagcgtggcgctttctcatagctcacgctgtaggtatctcagttcggtgtaggtcgttcgctccaagctgggctgtgtgcacgaaccccccgttcagcccgaccgctgcgccttatccggtaactatcgtcttgagtccaacccggtaagacacgacttatcgccactggcagcagccactggtaacaggattagcagagcgaggtatgtaggcggtgctacagagttcttgaagtggtggcctaactacggctacactagaagaacagtatttggtatctgcgctctgctgaagccagttaccttcggaaaaagagttggtagctcttgatccggcaaacaaaccaccgctggtagcggtggtttttttgtttgcaagcagcagattacgcgcagaaaaaaaggatctcaagaagatcctttgatcttttctacggggtctgacgctcagtggaacgaaaactcacgttaagggattttggtcatgagattatcaaaaaggatcttcacctagaaggtcctgtattagaggtcacgtgagtgttttgcgacattttgcgacaccatgtggtcacgctgggtatttaagcccgagtgagcacgcagggtctccattttgaagcgggaggtttgaacgcgcagccgccatccttttaaattaaaaatgaagttttaaatcaagcccaatctgaataatgttacaaccaattaaccaattctgattagaaaaactcatcgagcatcaaatgaaactgcaatttattcatatcaggattatcaataccatatttttgaaaaagccgtttctgtaatgaaggagaaaactcaccgaggcagttccataggatggcaagatcctggtatcggtctgcgattccgactcgtccaacatcaatacaacctattaatttcccctcgtcaaaaataaggttatcaagtgagaaatcaccatgagtgacgactgaatccggtgagaatggcaaaagtttatgcatttctttccagacttgttcaacaggccagccattacgctcgtcatcaaaatcactcgcatcaaccaaaccgttattcattcgtgattgcgcctgagcgagacgaaatacgcgatcgctgttaaaaggacaattacaaacaggaatcgaatgcaaccggcgcaggaacactgccagcgcatcaacaatattttcacctgaatcaggatattcttctaatacctggaatgctgtttttccggggatcgcagtggtgagtaaccatgcatcatcaggagtacggataaaatgcttgatggtcggaagaggcataaattccgtcagccagtttagtctgaccatctcatctgtaacatcattggcaacgctacctttgccatgtttcagaaacaactctggcgcatcgggcttcccatacaagcgatagattgtcgcacctgattgcccgacattatcgcgagcccatttatacccatataaatcagcatccatgttggaatttaatcgcggcctcgacgtttcccgttgaatatggctcataacaccccttgtattactgtttatgtaagcagacagttttattgttcatgatgatatatttttatcttgtgcaatgtaacatcagagattttgagacacgggccagagctgca

SEQ ID NO: 102 - DNA, 14590 bp, synthetic construct
  source 1..14590: mol_type = other DNA
atgccggggttttacgagattgtgattaaggtccccagcgaccttgacgagcatctgcccggcatttctgacagctttgtgaactgggtggccgagaaggaatgggagttgccgccagattctgacatggatctgaatctgattgagcaggcacccctgaccgtggccgagaagctgcagcgcgactttctgacggaatggcgccgtgtgagtaaggccccggaggctcttttctttgtgcaatttgagaagggagagagctacttccacatgcacgtgctcgtggaaaccaccggggtgaaatccatggttttgggacgtttcctgagtcagattcgcgaaaaactgattcagagaatttaccgcgggatcgagccgactttgccaaactggttcgcggtcacaaagaccagaaatggcgccggaggcgggaacaaggtggtggatgagtgctacatccccaattacttgctccccaaaacccagcctgagctccagtgggcgtggactaatatggaacagtatttaagcgcctgtttgaatctcacggagcgtaaacggttggtggcgcagcatctgacgcacgtgtcgcagacgcaggagcagaacaaagagaatcagaatcccaattctgatgcgccggtgatcagatcaaaaacttcagccaggtacatggagctggtcgggtggctcgtggacaaggggattacctcggagaagcagtggatccaggaggaccaggcctcatacatctccttcaatgcggcctccaactcgcggtcccaaatcaaggctgccttggacaatgcgggaaagattatgagcctgactaaaaccgcccccgactacctggtgggccagcagcccgtggaggacatttccagcaatcggatttataaaattttggaactaaacgggtacgatccccaatatgcggcttccgtctttctgggatgggccacgaaaaagttcggcaagaggaacaccatctggctgtttgggcctgcaactaccgggaagaccaacatcgcggaggccatagcccacactgtgcccttctacgggtgcgtaaactggaccaatgagaactttcccttcaacgactgtgtcgacaagatggtgatctggtgggaggaggggaagatgaccgccaaggtcgtggagtcggccaaagccattctcggaggaagcaaggtgcgcgtggaccagaaatgcaagtcctcggcccagatagacccgactcccgtgatcgtcacctccaacaccaacatgtgcgccgtgattgacgggaactcaacgaccttcgaacaccagcagccgttgcaagaccggatgttcaaatttgaactcacccgccgtctggatcatgactttgggaaggtcaccaagcaggaagtcaaagactttttccggtgggcaaaggatcacgtggttgaggtggagcatgaattctacgtcaaaaagggtggagccaagaaaagacccgcccccagtgacgcagatataagtgagcccaaacgggtgcgcgagtcagttgcgcagccatcgacgtcagacgcggaagcttcgatcaactacgcagacaggtaccaaaacaaatgttctcgtcacgtgggcatgaatctgatgctgtttccctgcagacaatgcgagagaatgaatcagaattcaaatatctgcttcactcacggacagaaagactgtttagagtgctttcccgtgtcagaatctcaacccgtttctgtcgtcaaaaaggcgtatcagaaactgtgctacattcatcatatcatgggaaaggtgccagacgcttgcactgcctgcgatctggtcaatgtggatttggatgactgcatctttgaacaataaatgatttaaatcaggtatggctgccgatggttatcttccagattggctcgaggacaacctctctgagggcattcgcgagtggtgggcgctgaaacctggagccccgaagcccaaagccaaccagcaaaagcaggacgacggccggggtctggtgcttcctggctacaagtacctcggacccttcaacggactcgacaagggggagcccgtcaacgcggcggacgcagcggccctcgagcacgacaaggcctacgaccagcagctgcaggcgggtgacaatccgtacctgcggtataaccacgccgacgccgagtttcaggagcgtctgcaagaagatacgtcttttgggggcaacctcgggcgagcagtcttccaggccaagaagcgggttctcgaacctctcggtctggttgaggaaggcgctaagacggctcctggaaagaagagaccggtagagccatcaccccagcgttctccagactcctctacgggcatcggcaagaaaggccaacagcccgccagaaaaagactcaattttggtcagactggcgactcagagtcagttccagaccctcaacctctcggagaacctccagcagcgccctctggtgtgggacctaatacaatggctgcaggcggtggcgcaccaatggcagacaataacgaaggcgccgacggagtgggtagttcctcgggaaattggcattgcgattccacatggctgggcgacagagtcatcaccaccagcacccgaacctgggccctgcccacctacaacaaccacctctacaagcaaatctccaacgggacatcgggaggagccaccaacgacaacacctacttcggctacagcaccccctgggggtattttgactttaacagattccactgccacttttcaccacgtgactggcagcgactcatcaacaacaactggggattccggcccaagagactcagcttcaagctcttcaacatccaggtcaaggaggtcacgcagaatgaaggcaccaagaccatcgccaataacctcaccagcaccatccaggtgtttacggactcggagtaccagctgccgtacgttctcggctctgcccaccagggctgcctgcctccgttcccggcggacgtgttcatgattccccagtacggctacctaacactcaacaacggtagtcaggccgtgggacgctcctccttctactgcctggaatactttccttcgcagatgctgagaaccggcaacaacttccagtttacttacaccttcgaggacgtgcctttccacagcagctacgcccacagccagagcttggaccggctgatgaatcctctgattgaccagtacctgtactacttgtctcggactcaaacaacaggaggcacggcaaatacgcagactctgggcttcagccaaggtgggcctaatacaatggccaatcaggcaaagaactggctgccaggaccctgttaccgccaacaacgcgtctcaacgacaaccgggcaaaacaacaatagcaactttgcctggactgctgggaccaaataccatctgaatggaagaaattcattggctaatcctggcatcgctatggcaacacacaaagacgacgaggagcgtttttttcccagtaacgggatcctgatttttggcaaacaaaatgctgccagagacaatgcggattacagcgatgtcatgctcaccagcgaggaagaaatcaaaaccactaaccctgtggctacagaggaatacggtatcgtggcagataacttgcagcagcaaaacacggctcctcaaattggaactgtcaacagccagggggccttacccggtatggtctggcagaaccgggacgtgtacctgcagggtcccatctgggccaagattcctcacacggacggcaacttccacccgtctccgctgatgggcggctttggcctgaaacatcctccgcctcagatcctgatcaagaacacgcctgtacctgcggatcctccgaccaccttcaaccagtcaaagctgaactctttcatcacgcaatacagcaccggacaggtcagcgtggaaattgaatgggagctgcagaaggaaaacagcaagcgctggaaccccgagatccagtacacctccaactactacaaatctacaagtgtggactttgctgttaatacagaaggcgtgtactctgaaccccgccccattggcacccgttacctcacccgtaatctgtaattgcctgttaatcaataaaccggttgattcgtttcagttgaactttggtctctgcgaagggcgaattcgtttaaacctgcaggactagagccgaattctgcatcgcgatagggataacagggtaataaataatgtactagagacactttcaataaaggcaaatgcttttatttgtacactctcgggtgattatttacccccacccttgccgtctgcgccgttcagaagtcgaaggggttctgtctggcatcggaatgggccacgggcagagacacgttccggtactggtgcttggtggaccacttgaactcaggcacgaccattctaggcagctctgtgaagttctcgctccacaggctccgcaccatcaccagggcgttcagcaggtcaggggcgctgattttgaagtcgcagttaggtccgccgccctgggctctgctgtttctgtacacagggttgcagcactggaacacaataagagcagggtggtgcacgctggccagcacagacttgtcgctgatcaggtcggcgtcgagatcctcggcgttagacaaggcaaaaggggtcagcttgggcagctggcggcccaggaaaggggcgtggccgggcttgctattgcactcgcatctcagaggcatcagcaggtggccgtggccggtctgggcgttggggtacagggcctgcataaaggccttgatctgtttgaaggccacttgggccttggcgccttcggagaagaacatgccgcagcttttgccgctgaactggttggcggggcaggcggcgtcgtgcacacaacaccgggcgtcggtattgctgatctgcaccacgtttctgccccatctgttcttcacgatcttggccttgctgctctgctctttcagggccctctggccgttctcagaggtgacgtccatctcgatcacatgttccttgttgatcatgatgctgccgtgcagacacttcagctcgccctcgatttccgcgcatctgtgcagccacagggcacaaccggtaggctcgtggtgcttgtatgtcacctcagcaaaagattgcaggtaggcttgcaggaatctgcccatcatggtcacgaaggtcttgttggaggtaaaagtcagctgcagtcctctgtgttcctcgttcagccatgtcttgcacacggcggccagagcctcgacctgatctggcagcagcttgaaattagccttcaggtcgttgtccacgtgatacttatccatcagtgctctggcggcttccatgcccttctcccaggcggaaacgatgggcacgctcagggggttcatcacggtgatctcgctttcagcttctgaaggttcctcctcttcctcctgtgttctcatgccccgagccacggggtcgtcctcattcagtctccgcacggttctttttcctccctttccgtgcttaatcagtacaggaggattagagaagcccaccatctggagggcgacgtcctccctttcttcttcgctatccacgatcacttctgggctggggggccgttcaggctttgggctaggccgtttttttttcttcttaggggcgatagccagatcagcggcgcttgtagagggccgaggactaggggttctaggcacgagggcgtcctggctgctgtcctcctcatcctcgctctcgatccgtctccgcattctcttcttagggggggcccgcggagggggagggctagggctaggggacgacacatcttccatggttggaggtctgcgagcagcgcctctgcctctctctggtgttgtctcgcgctgttcttcctctctagaggccatttccttctcctataggcagaaaaagatcgttgaaactcactccggggctgtggacgtcggcttaccttcgcaaatttgtacctgaggactaccacgcccacgagattaggttctacgaagaccaatcccgcccgcctaatgcggagcttaccgcctgcgtcattacccagggccacattcttggccaattgcaagccatcaacaaagcccgccaagagtttctgctacgaaagggacggggggtttacttggacccccagtccggcgaggagctcaacccaatccccccgccgccgcagccctatcagcagcagccgcgggcccttgcttcccaggatggcacccaaaaagaagctgcagctgccgccgccacccacggacgaggaggaatactgggacagtcaggcagaggaggttttggacgaggaggaggaggacatgatggaagactgggagagcctagacgaggaagcttccgaggtcgaagaggtgtcagacgaaacaccgtcaccctcggtcgcattcccctcgccggcgccccagaaatcggcaaccggttccagcatggctacaacctccgctcctcaggcgccgccggcactgcccgttcgccgacccaaccgtagatgggacaccactggaaccagggccggtaagtccaagcagccgccgccgttagcccaagagcaacaacagcgccaaggctaccgctcatggcgcgggcacaagaacgccatagttgcttgcttgcaagactgtgggggcaacatctccttcgcccgccgctttcttctctaccatcacggcgtggccttcccccgtaacatcctgcattactaccgtcatctctacagcccatactgcaccggcggcagcggcagcaacagcagcggccacacagaagcaaaggcgaccggatagcaagactctgacaaagcccaagaaatccacagcggcggcagcagcaggaggaggagcgctgcgtctggcgcccaacgaacccgtatcgacccgcgagcttagaaacaggatttttcccactctgtatgctatatttcaacagagcaggggccaagaacaagagctgaaaataaaaaacaggtctctgcgatccctcacccgcagctgcctgtatcacaaaagcgaagatcagcttcggcgcacgctggaagacgcggaggctctcttcagtaaatactgcgcgctgactcttaaggactagtttcgcgccctttctcaaatttaagcgcgaaaactacgtcatctccagcggccacacccggcgccagcacctgttgtcagcgccattttttagggcggagtaacttgtatgtgttgggaattgtagttttcttaaaatgggaagtgacgtaacgtgggaaaacggaagtgacgatttgaggaagttgtgggttttttggctttcgtttctgggcgtaggttcgcgtgcggttttctgggtgttttttgtggactttaaccgttacgtcattttttagtcctatatatactcgctctgcacttggcccttttttacactgtgactgattgagctggtgccgtgtcgagtggtgtttttttaataggttttcttttttactggtaaggctgactgttatgactacgtccggcgttccatttggcatgacactacgaccaacacgatctcggttgtctcggcgcactccgtacagtagggatcgtctacctccttttgagacagaaacccgcgctaccatactggaggatcatccgctgctgcccgaatgtaacactttgacaatgcacaacgtgagttacgtgcgaggtcttccctgcagtgtgggatttacgctgattcaggaatgggttgttccctgggatatggttctaacgcgggaggagcttgtaatcctgaggaagtgtatgcacgtgtgcctgtgttgtgccaacattgatatcatgacgagcatgatgatccatggttacgagtcctgggctctccactgtcattgttccagtcccggttccctgcagtgtatagccggcgggcaggttttggccagctggtttaggatggtggtggatggcgccatgtttaatcagaggtttatatggtaccgggaggtggtgaattacaacatgccaaaagaggtaatgtttatgtccagcgtgtttatgaggggtcgccacttaatctacctgcgcttgtggtatgatggccacgtgggttctgtggtccccgccatgagctttggatacagcgccttgcactgtgggattttgaacaatattgtggtgctgtgctgcagttactgtgctgatttaagtgagatcagggtgcgctgctgtgcccggaggacaaggcgccttatgctgcgggcggtgcgaatcatcgctgaggagaccactgccatgttgtattcctgcaggacggagcggcggcggcagcagtttattcgcgcgctgctgcagcaccaccgccctatcctgatgcacgattatgactctacccccatgtaggcgtggacttctccttcgccgcccgttaagcaaccgcaagttggacagcagcctgtggctcagcagctggacagcgacatgaacttaagtgagctgcccggggagtttattaatatcactgatgagcgtttggctcgacaggaaaccgtgtggaatataacacctaagaatatgtctgttacccatgatatgatgctttttaaggccagccggggagaaaggactgtgtactctgtgtgttgggagggaggtggcaggttgaatactagggttctgtgagtttgattaaggtacggtgatctgtataagctatgtggtggtggggctatactactgaatgaaaaatgacttgaaattttctgcaattgaaaaataaacacgttgaaacataacacaaacgattctttattcttgggcaatgtatgaaaaagtgtaagaggatgtggcaaatatttcattaatgtagttgtggccagaccagtcccatgaaaatgacatagagtatgcacttggagttgtgtctcctgtttcctgtgtaccgtttagtgtaatggttagtgttacaggtttagttttgtctccgtttaagtaaacttgactgacaatgttacttttggcagttttaccgtgagattttggataagctgataggttagttaattaaggccttaattaggctgcgcgctcgctcgctcactgaggccgcccgggcaaagcccgggcgtcgggcgacctttggtcgcccggcctcagtgagcgagcgagcgcgcagagagggagtggccaactccatcactaggggttcctcatatgcagggtaatggggatcctctagaggccgtccgccctcggcaccatcctcacgacacccaaatatggcgacgggtgaggaatggtggggagttatttttagagcggtgaggaaggtgggcaggcagcaggtgttgggggagttatttttagagcggggagttatttttagagcggaggaatggtggacacccaaatatggcgacggttcctcacggacacccaaatatggcgacgggccctcggccggggccgcattcctgggggccgggcggtgctcccgcccgcctcgataaaaggctccggggccggcggcggcccacgagctacccggaggagcgggaggcgccaagcggaattcgccaccatgctttggtgggaagaggtggaagattgctatgagagggaagatgtgcagaagaaaaccttcaccaaatgggtcaatgcccagttcagcaagtttggcaagcagcacattgagaacctgttcagtgacctgcaggatggcagaaggctgctggatctgctggaaggcctgacaggccagaagctgcctaaagagaagggcagcacaagagtgcatgccctgaacaatgtgaacaaggccctgagagtgctgcagaacaacaatgtggacctggtcaatattggcagcacagacattgtggatggcaaccacaagctgaccctgggcctgatctggaacatcatcctgcactggcaagtgaagaatgtgatgaagaacatcatggctggcctgcagcagaccaactctgagaagatcctgctgagctgggtcagacagagcaccagaaactaccctcaagtgaatgtgatcaacttcaccacctcttggagtgatggactggccctgaatgccctgatccacagccacagacctgacctgtttgactggaactctgttgtgtgccagcagtctgccacacagagactggaacatgccttcaacattgccagataccagctgggaattgagaaactgctggaccctgaggatgtggacaccacctatcctgacaagaaatccatcctcatgtacatcaccagcctgttccaggtgctgccccagcaagtgtccattgaggccattcaagaggttgagatgctgcccagacctcctaaagtgaccaaagaggaacacttccagctgcaccaccagatgcactactctcagcagatcacagtgtctctggcccagggatatgagagaacaagcagccccaagcctaggttcaagagctatgcctacacacaggctgcctatgtgaccacatctgaccccacaagaagcccatttccaagccagcatctggaagcccctgaggacaagagctttggcagcagcctgatggaatctgaagtgaacctggatagataccagacagccctggaagaagtgctgtcctggctgctgtctgctgaggatacactgcaggctcagggtgaaatcagcaatgatgtggaagtggtcaaggaccagtttcacacccatgagggctacatgatggacctgacagcccaccagggcagagtgggaaatatcctgcagctgggctccaagctgattggcacaggcaagctgtctgaggatgaagagacagaggtgcaagagcagatgaacctgctgaacagcagatgggagtgtctgagagtggccagcatggaaaagcagagcaacctgcacagagtgctcatggacctgcagaatcagaaactgaaagaactgaatgactggctgaccaagacagaagaaaggactaggaagatggaagaggaacctctgggaccagacctggaagatctgaaaagacaggtgcagcagcataaggtgctgcaagaggaccttgagcaagagcaagtcagagtgaacagcctgacacacatggtggtggttgtggatgagtcctctggggatcatgccacagctgctctggaagaacagctgaaggtgctgggagacagatgggccaacatctgtaggtggacagaggatagatgggtgctgctccaggacattctgctgaagtggcagagactgacagaggaacagtgcctgttttctgcctggctctctgagaaagaggatgctgtcaacaagatccataccacaggcttcaaggatcagaatgagatgctcagctccctgcagaaactggctgtgctgaaggctgacctggaaaagaaaaagcagtccatgggcaagctctacagcctgaagcaggacctgctgtctaccctgaagaacaagtctgtgacccagaaaactgaggcctggctggacaactttgctagatgctgggacaacctggtgcagaagctggaaaagtctacagcccagatcagccagcaacctgatcttgcccctggcctgaccacaattggagcctctccaacacagactgtgaccctggttacccagccagtggtcaccaaagagacagccatcagcaaactggaaatgcccagctctctgatgctggaagtccccacactggaaaggctgcaagaacttcaagaggccacagatgagctggacctgaagctgagacaggctgaagtgatcaaaggcagctggcagccagttggggacctgctcattgatagcctgcaggaccatctggaaaaagtgaaagccctgaggggagagattgcccctctgaaagaaaatgtgtcccatgtgaatgacctggccagacagctgaccacactgggaatccagctgagcccctacaacctgagcacccttgaggacctgaacaccaggtggaagctcctccaggtggcagtggaagatagagtcaggcagctgcatgaggcccacagagattttggaccagccagccagcactttctgtctacctctgtgcaaggcccctgggagagagctatctctcctaacaaggtgccctactacatcaaccatgagacacagaccacctgttgggatcaccccaagatgacagagctgtaccagagtctggcagacctcaacaatgtcagattcagtgcctacaggactgccatgaagctcagaaggctccagaaagctctgtgcctggacctgctttccctgagtgcagcttgtgatgccctggaccagcacaatctgaagcagaatgaccagcctatggacatcctccagatcatcaactgcctcaccaccatctatgataggctggaacaagagcacaacaatctggtcaatgtgcccctgtgtgtggacatgtgcctgaattggctgctgaatgtgtatgacacaggcagaacaggcaggatcagagtcctgtccttcaagacaggcatcatctccctgtgcaaagcccacttggaggacaagtacagatacctgttcaagcaagtggcctccagcacaggcttttgtgaccagagaaggctgggcctgctcctgcatgacagcattcagatccctagacagctgggagaagtggcttcctttggaggcagcaatattgagccatcagtcaggtcctgttttcagtttgccaacaacaagcctgagattgaggctgccctgttcctggactggatgagacttgagcctcagagcatggtctggctgcctgtgcttcatagagtggctgctgctgagactgccaagcaccaggccaagtgcaacatctgcaaagagtgccccatcattggcttcagatacagatccctgaagcacttcaactatgatatctgccagagctgcttctttagtggcagggttgccaagggccacaaaatgcactaccccatggtggaatactgcaccccaacaacctctggggaagatgttagagactttgccaaggtgctgaaaaacaagttcaggaccaagagatactttgctaagcaccccagaatgggctacctgcctgtccagacagtgcttgagggtgacaacatggaaacccctgtgacactgatcaatttctggccagtggactctgcccctgcctcaagtccacagctgtcccatgatgacacccacagcagaattgagcactatgcctccagactggcagagatggaaaacagcaatggcagctacctgaatgatagcatcagccccaatgagagcattgatgatgagcatctgctgatccagcactactgtcagtccctgaaccaggactctccactgagccagcctagaagccctgctcagatcctgatcagccttgagtctgaggaaaggggagagctggaaagaatcctggcagatcttgaggaagagaacagaaacctgcaggcagagtatgacaggctcaaacagcagcatgagcacaagggactgagccctctgccttctcctcctgaaatgatgcccacctctccacagtctccaaggtgatgactcgagaggcctaataaagagctcagatgcatcgatcagagtgtgttggttttttgtgtgccagggtaatgggctagctgcggccgcaggaacccctagtgatggagttggccactccctctctgcgcgctcgctcgctcactgaggccgggcgaccaaaggtcgcccgacgcccgggctttgcccgggcggcctcagtgagcgagcgagcgcgcagccttaattaagcataaatccaacagcgtttgtataggctgtcgcccctcctgacgcggtaggaggaggggagggtgccctgcatgtctgccgctgctcttgctcttgccgctgctgaggaggggggcgcatctgccgcagcaccggatgcatctgggaaaagcaaaaaaggggctcgtccctgtttccggaggaatttgcaagcggggtcttgcatgacggggaggcaaacccccgttcgccgcagtccggccggtccgagactcgaaccgggggtcccgcgactcaacccttggaaaataaccctccggctacagggagcgagccacttaatgctttcgctttccagcctaaccgcttacgctgcgcgcggccagtggccaaaaaagctagcgcagcagccgccgcgcctggaaggaagccaaaaggagcactcccccgttgtctgacgtcgcacacctgggttcgacacgcgggcggtaaccgcatggatcacggcggacggccggatacggggctcgaaccccggtcgtccgccatgatacccttgcgaatttatccaccagaccacggaagagtgcccgcttacaggctctccttttgcacggtctagagcgtcaacgattgcgcgcgcctgaccggccagagcgtcccgaccatggagcactttttgccgctgcgcaacatctggaaccgcgtccgcgactttccgcgcgcctccaccaccgccgccggcatcacctggatgtccaggtacatctacggata

SEQ ID NO: 103 - DNA, 14590 bp, synthetic construct
  source 1..14590: mol_type = other DNA
atgccggggttttacgagattgtgattaaggtccccagcgaccttgacgagcatctgcccggcatttctgacagctttgtgaactgggtggccgagaaggaatgggagttgccgccagattctgacatggatctgaatctgattgagcaggcacccctgaccgtggccgagaagctgcagcgcgactttctgacggaatggcgccgtgtgagtaaggccccggaggctcttttctttgtgcaatttgagaagggagagagctacttccacatgcacgtgctcgtggaaaccaccggggtgaaatccatggttttgggacgtttcctgagtcagattcgcgaaaaactgattcagagaatttaccgcgggatcgagccgactttgccaaactggttcgcggtcacaaagaccagaaatggcgccggaggcgggaacaaggtggtggatgagtgctacatccccaattacttgctccccaaaacccagcctgagctccagtgggcgtggactaatatggaacagtatttaagcgcctgtttgaatctcacggagcgtaaacggttggtggcgcagcatctgacgcacgtgtcgcagacgcaggagcagaacaaagagaatcagaatcccaattctgatgcgccggtgatcagatcaaaaacttcagccaggtacatggagctggtcgggtggctcgtggacaaggggattacctcggagaagcagtggatccaggaggaccaggcctcatacatctccttcaatgcggcctccaactcgcggtcccaaatcaaggctgccttggacaatgcgggaaagattatgagcctgactaaaaccgcccccgactacctggtgggccagcagcccgtggaggacatttccagcaatcggatttataaaattttggaactaaacgggtacgatccccaatatgcggcttccgtctttctgggatgggccacgaaaaagttcggcaagaggaacaccatctggctgtttgggcctgcaactaccgggaagaccaacatcgcggaggccatagcccacactgtgcccttctacgggtgcgtaaactggaccaatgagaactttcccttcaacgactgtgtcgacaagatggtgatctggtgggaggaggggaagatgaccgccaaggtcgtggagtcggccaaagccattctcggaggaagcaaggtgcgcgtggaccagaaatgcaagtcctcggcccagatagacccgactcccgtgatcgtcacctccaacaccaacatgtgcgccgtgattgacgggaactcaacgaccttcgaacaccagcagccgttgcaagaccggatgttcaaatttgaactcacccgccgtctggatcatgactttgggaaggtcaccaagcaggaagtcaaagactttttccggtgggcaaaggatcacgtggttgaggtggagcatgaattctacgtcaaaaagggtggagccaagaaaagacccgcccccagtgacgcagatataagtgagcccaaacgggtgcgcgagtcagttgcgcagccatcgacgtcagacgcggaagcttcgatcaactacgcagacaggtaccaaaacaaatgttctcgtcacgtgggcatgaatctgatgctgtttccctgcagacaatgcgagagaatgaatcagaattcaaatatctgcttcactcacggacagaaagactgtttagagtgctttcccgtgtcagaatctcaacccgtttctgtcgtcaaaaaggcgtatcagaaactgtgctacattcatcatatcatgggaaaggtgccagacgcttgcactgcctgcgatctggtcaatgtggatttggatgactgcatctttgaacaataaatgatttaaatcaggtatggctgccgatggttatcttccagattggctcgaggacaacctctctgagggcattcgcgagtggtgggcgctgaaacctggagccccgaagcccaaagccaaccagcaaaagcaggacgacggccggggtctggtgcttcctggctacaagtacctcggacccttcaacggactcgacaagggggagcccgtcaacgcggcggacgcagcggccctcgagcacgacaaggcctacgaccagcagctgcaggcgggtgacaatccgtacctgcggtataaccacgccgacgccgagtttcaggagcgtctgcaagaagatacgtcttttgggggcaacctcgggcgagcagtcttccaggccaagaagcgggttctcgaacctctcggtctggttgaggaaggcgctaagacggctcctggaaagaagagaccggtagagccatcaccccagcgttctccagactcctctacgggcatcggcaagaaaggccaacagcccgccagaaaaagactcaattttggtcagactggcgactcagagtcagttccagaccctcaacctctcggagaacctccagcagcgccctctggtgtgggacctaatacaatggctgcaggcggtggcgcaccaatggcagacaataacgaaggcgccgacggagtgggtagttcctcgggaaattggcattgcgattccacatggctgggcgacagagtcatcaccaccagcacccgaacctgggccctgcccacctacaacaaccacctctacaagcaaatctccaacgggacatcgggaggagccaccaacgacaacacctacttcggctacagcaccccctgggggtattttgactttaacagattccactgccacttttcaccacgtgactggcagcgactcatcaacaacaactggggattccggcccaagagactcagcttcaagctcttcaacatccaggtcaaggaggtcacgcagaatgaaggcaccaagaccatcgccaataacctcaccagcaccatccaggtgtttacggactcggagtaccagctgccgtacgttctcggctctgcccaccagggctgcctgcctccgttcccggcggacgtgttcatgattccccagtacggctacctaacactcaacaacggtagtcaggccgtgggacgctcctccttctactgcctggaatactttccttcgcagatgctgagaaccggcaacaacttccagtttacttacaccttcgaggacgtgcctttccacagcagctacgcccacagccagagcttggaccggctgatgaatcctctgattgaccagtacctgtactacttgtctcggactcaaacaacaggaggcacggcaaatacgcagactctgggcttcagccaaggtgggcctaatacaatggccaatcaggcaaagaactggctgccaggaccctgttaccgccaacaacgcgtctcaacgacaaccgggcaaaacaacaatagcaactttgcctggactgctgggaccaaataccatctgaatggaagaaattcattggctaatcctggcatcgctatggcaacacacaaagacgacgaggagcgtttttttcccagtaacgggatcctgatttttggcaaacaaaatgctgccagagacaatgcggattacagcgatgtcatgctcaccagcgaggaagaaatcaaaaccactaaccctgtggctacagaggaatacggtatcgtggcagataacttgcagcagcaaaacacggctcctcaaattggaactgtcaacagccagggggccttacccggtatggtctggcagaaccgggacgtgtacctgcagggtcccatctgggccaagattcctcacacggacggcaacttccacccgtctccgctgatgggcggctttggcctgaaacatcctccgcctcagatcctgatcaagaacacgcctgtacctgcggatcctccgaccaccttcaaccagtcaaagctgaactctttcatcacgcaatacagcaccggacaggtcagcgtggaaattgaatgggagctgcagaaggaaaacagcaagcgctggaaccccgagatccagtacacctccaactactacaaatctacaagtgtggactttgctgttaatacagaaggcgtgtactctgaaccccgccccattggcacccgttacctcacccgtaatctgtaattgcctgttaatcaataaaccggttgattcgtttcagttgaactttggtctctgcgaagggcgaattcgtttaaacctgcaggactagagccgaattctgcatcgcgatagggataacagggtaataaataatgtactagagacactttcaataaaggcaaatgcttttatttgtacactctcgggtgattatttacccccacccttgccgtctgcgccgttcagaagtcgaaggggttctgtctggcatcggaatgggccacgggcagagacacgttccggtactggtgcttggtggaccacttgaactcaggcacgaccattctaggcagctctgtgaagttctcgctccacaggctccgcaccatcaccagggcgttcagcaggtcaggggcgctgattttgaagtcgcagttaggtccgccgccctgggctctgctgtttctgtacacagggttgcagcactggaacacaataagagcagggtggtgcacgctggccagcacagacttgtcgctgatcaggtcggcgtcgagatcctcggcgttagacaaggcaaaaggggtcagcttgggcagctggcggcccaggaaaggggcgtggccgggcttgctattgcactcgcatctcagaggcatcagcaggtggccgtggccggtctgggcgttggggtacagggcctgcataaaggccttgatctgtttgaaggccacttgggccttggcgccttcggagaagaacatgccgcagcttttgccgctgaactggttggcggggcaggcggcgtcgtgcacacaacaccgggcgtcggtattgctgatctgcaccacgtttctgccccatctgttcttcacgatcttggccttgctgctctgctctttcagggccctctggccgttctcagaggtgacgtccatctcgatcacatgttccttgttgatcatgatgctgccgtgcagacacttcagctcgccctcgatttccgcgcatctgtgcagccacagggcacaaccggtaggctcgtggtgcttgtatgtcacctcagcaaaagattgcaggtaggcttgcaggaatctgcccatcatggtcacgaaggtcttgttggaggtaaaagtcagctgcagtcctctgtgttcctcgttcagccatgtcttgcacacggcggccagagcctcgacctgatctggcagcagcttgaaattagccttcaggtcgttgtccacgtgatacttatccatcagtgctctggcggcttccatgcccttctcccaggcggaaacgatgggcacgctcagggggttcatcacggtgatctcgctttcagcttctgaaggttcctcctcttcctcctgtgttctcatgccccgagccacggggtcgtcctcattcagtctccgcacggttctttttcctccctttccgtgcttaatcagtacaggaggattagagaagcccaccatctggagggcgacgtcctccctttcttcttcgctatccacgatcacttctgggctggggggccgttcaggctttgggctaggccgtttttttttcttcttaggggcgatagccagatcagcggcgcttgtagagggccgaggactaggggttctaggcacgagggcgtcctggctgctgtcctcctcatcctcgctctcgatccgtctccgcattctcttcttagggggggcccgcggagggggagggctagggctaggggacgacacatcttccatggttggaggtctgcgagcagcgcctctgcctctctctggtgttgtctcgcgctgttcttcctctctagaggccatttccttctcctataggcagaaaaagatcgttgaaactcactccggggctgtggacgtcggcttaccttcgcaaatttgtacctgaggactaccacgcccacgagattaggttctacgaagaccaatcccgcccgcctaatgcggagcttaccgcctgcgtcattacccagggccacattcttggccaattgcaagccatcaacaaagcccgccaagagtttctgctacgaaagggacggggggtttacttggacccccagtccggcgaggagctcaacccaatccccccgccgccgcagccctatcagcagcagccgcgggcccttgcttcccaggatggcacccaaaaagaagctgcagctgccgccgccacccacggacgaggaggaatactgggacagtcaggcagaggaggttttggacgaggaggaggaggacatgatggaagactgggagagcctagacgaggaagcttccgaggtcgaagaggtgtcagacgaaacaccgtcaccctcggtcgcattcccctcgccggcgccccagaaatcggcaaccggttccagcatggctacaacctccgctcctcaggcgccgccggcactgcccgttcgccgacccaaccgtagatgggacaccactggaaccagggccggtaagtccaagcagccgccgccgttagcccaagagcaacaacagcgccaaggctaccgctcatggcgcgggcacaagaacgccatagttgcttgcttgcaagactgtgggggcaacatctccttcgcccgccgctttcttctctaccatcacggcgtggccttcccccgtaacatcctgcattactaccgtcatctctacagcccatactgcaccggcggcagcggcagcaacagcagcggccacacagaagcaaaggcgaccggatagcaagactctgacaaagcccaagaaatccacagcggcggcagcagcaggaggaggagcgctgcgtctggcgcccaacgaacccgtatcgacccgcgagcttagaaacaggatttttcccactctgtatgctatatttcaacagagcaggggccaagaacaagagctgaaaataaaaaacaggtctctgcgatccctcacccgcagctgcctgtatcacaaaagcgaagatcagcttcggcgcacgctggaagacgcggaggctctcttcagtaaatactgcgcgctgactcttaaggactagtttcgcgccctttctcaaatttaagcgcgaaaactacgtcatctccagcggccacacccggcgccagcacctgttgtcagcgccattttttagggcggagtaacttgtatgtgttgggaattgtagttttcttaaaatgggaagtgacgtaacgtgggaaaacggaagtgacgatttgaggaagttgtgggttttttggctttcgtttctgggcgtaggttcgcgtgcggttttctgggtgttttttgtggactttaaccgttacgtcattttttagtcctatatatactcgctctgcacttggcccttttttacactgtgactgattgagctggtgccgtgtcgagtggtgtttttttaataggttttcttttttactggtaaggctgactgttatgactacgtccggcgttccatttggcatgacactacgaccaacacgatctcggttgtctcggcgcactccgtacagtagggatcgtctacctccttttgagacagaaacccgcgctaccatactggaggatcatccgctgctgcccgaatgtaacactttgacaatgcacaacgtgagttacgtgcgaggtcttccctgcagtgtgggatttacgctgattcaggaatgggttgttccctgggatatggttctaacgcgggaggagcttgtaatcctgaggaagtgtatgcacgtgtgcctgtgttgtgccaacattgatatcatgacgagcatgatgatccatggttacgagtcctgggctctccactgtcattgttccagtcccggttccctgcagtgtatagccggcgggcaggttttggccagctggtttaggatggtggtggatggcgccatgtttaatcagaggtttatatggtaccgggaggtggtgaattacaacatgccaaaagaggtaatgtttatgtccagcgtgtttatgaggggtcgccacttaatctacctgcgcttgtggtatgatggccacgtgggttctgtggtccccgccatgagctttggatacagcgccttgcactgtgggattttgaacaatattgtggtgctgtgctgcagttactgtgctgatttaagtgagatcagggtgcgctgctgtgcccggaggacaaggcgccttatgctgcgggcggtgcgaatcatcgctgaggagaccactgccatgttgtattcctgcaggacggagcggcggcggcagcagtttattcgcgcgctgctgcagcaccaccgccctatcctgatgcacgattatgactctacccccatgtaggcgtggacttctccttcgccgcccgttaagcaaccgcaagttggacagcagcctgtggctcagcagctggacagcgacatgaacttaagtgagctgcccggggagtttattaatatcactgatgagcgtttggctcgacaggaaaccgtgtggaatataacacctaagaatatgtctgttacccatgatatgatgctttttaaggccagccggggagaaaggactgtgtactctgtgtgttgggagggaggtggcaggttgaatactagggttctgtgagtttgattaaggtacggtgatctgtataagctatgtggtggtggggctatactactgaatgaaaaatgacttgaaattttctgcaattgaaaaataaacacgttgaaacataacacaaacgattctttattcttgggcaatgtatgaaaaagtgtaagaggatgtggcaaatatttcattaatgtagttgtggccagaccagtcccatgaaaatgacatagagtatgcacttggagttgtgtctcctgtttcctgtgtaccgtttagtgtaatggttagtgttacaggtttagttttgtctccgtttaagtaaacttgactgacaatgttacttttggcagttttaccgtgagattttggataagctgataggttagttaattaaggctgcgcgctcgctcgctcactgaggccgcccgggcaaagcccgggcgtcgggcgacctttggtcgcccggcctcagtgagcgagcgagcgcgcagagagggagtggccaactccatcactaggggttcctgcggccgcagctagcccattaccctggcacacaaaaaaccaacacactctgatcgatgcatctgagctctttattaggcctctcgagtcatcaccttggagactgtggagaggtgggcatcatttcaggaggagaaggcagagggctcagtcccttgtgctcatgctgctgtttgagcctgtcatactctgcctgcaggtttctgttctcttcctcaagatctgccaggattctttccagctctcccctttcctcagactcaaggctgatcaggatctgagcagggcttctaggctggctcagtggagagtcctggttcagggactgacagtagtgctggatcagcagatgctcatcatcaatgctctcattggggctgatgctatcattcaggtagctgccattgctgttttccatctctgccagtctggaggcatagtgctcaattctgctgtgggtgtcatcatgggacagctgtggacttgaggcaggggcagagtccactggccagaaattgatcagtgtcacaggggtttccatgttgtcaccctcaagcactgtctggacaggcaggtagcccattctggggtgcttagcaaagtatctcttggtcctgaacttgtttttcagcaccttggcaaagtctctaacatcttccccagaggttgttggggtgcagtattccaccatggggtagtgcattttgtggcccttggcaaccctgccactaaagaagcagctctggcagatatcatagttgaagtgcttcagggatctgtatctgaagccaatgatggggcactctttgcagatgttgcacttggcctggtgcttggcagtctcagcagcagccactctatgaagcacaggcagccagaccatgctctgaggctcaagtctcatccagtccaggaacagggcagcctcaatctcaggcttgttgttggcaaactgaaaacaggacctgactgatggctcaatattgctgcctccaaaggaagccacttctcccagctgtctagggatctgaatgctgtcatgcaggagcaggcccagccttctctggtcacaaaagcctgtgctggaggccacttgcttgaacaggtatctgtacttgtcctccaagtgggctttgcacagggagatgatgcctgtcttgaaggacaggactctgatcctgcctgttctgcctgtgtcatacacattcagcagccaattcaggcacatgtccacacacaggggcacattgaccagattgttgtgctcttgttccagcctatcatagatggtggtgaggcagttgatgatctggaggatgtccataggctggtcattctgcttcagattgtgctggtccagggcatcacaagctgcactcagggaaagcaggtccaggcacagagctttctggagccttctgagcttcatggcagtcctgtaggcactgaatctgacattgttgaggtctgccagactctggtacagctctgtcatcttggggtgatcccaacaggtggtctgtgtctcatggttgatgtagtagggcaccttgttaggagagatagctctctcccaggggccttgcacagaggtagacagaaagtgctggctggctggtccaaaatctctgtgggcctcatgcagctgcctgactctatcttccactgccacctggaggagcttccacctggtgttcaggtcctcaagggtgctcaggttgtaggggctcagctggattcccagtgtggtcagctgtctggccaggtcattcacatgggacacattttctttcagaggggcaatctctcccctcagggctttcactttttccagatggtcctgcaggctatcaatgagcaggtccccaactggctgccagctgcctttgatcacttcagcctgtctcagcttcaggtccagctcatctgtggcctcttgaagttcttgcagcctttccagtgtggggacttccagcatcagagagctgggcatttccagtttgctgatggctgtctctttggtgaccactggctgggtaaccagggtcacagtctgtgttggagaggctccaattgtggtcaggccaggggcaagatcaggttgctggctgatctgggctgtagacttttccagcttctgcaccaggttgtcccagcatctagcaaagttgtccagccaggcctcagttttctgggtcacagacttgttcttcagggtagacagcaggtcctgcttcaggctgtagagcttgcccatggactgctttttcttttccaggtcagccttcagcacagccagtttctgcagggagctgagcatctcattctgatccttgaagcctgtggtatggatcttgttgacagcatcctctttctcagagagccaggcagaaaacaggcactgttcctctgtcagtctctgccacttcagcagaatgtcctggagcagcacccatctatcctctgtccacctacagatgttggcccatctgtctcccagcaccttcagctgttcttccagagcagctgtggcatgatccccagaggactcatccacaaccaccaccatgtgtgtcaggctgttcactctgacttgctcttgctcaaggtcctcttgcagcaccttatgctgctgcacctgtcttttcagatcttccaggtctggtcccagaggttcctcttccatcttcctagtcctttcttctgtcttggtcagccagtcattcagttctttcagtttctgattctgcaggtccatgagcactctgtgcaggttgctctgcttttccatgctggccactctcagacactcccatctgctgttcagcaggttcatctgctcttgcacctctgtctcttcatcctcagacagcttgcctgtgccaatcagcttggagcccagctgcaggatatttcccactctgccctggtgggctgtcaggtccatcatgtagccctcatgggtgtgaaactggtccttgaccacttccacatcattgctgatttcaccctgagcctgcagtgtatcctcagcagacagcagccaggacagcacttcttccagggctgtctggtatctatccaggttcacttcagattccatcaggctgctgccaaagctcttgtcctcaggggcttccagatgctggcttggaaatgggcttcttgtggggtcagatgtggtcacataggcagcctgtgtgtaggcatagctcttgaacctaggcttggggctgcttgttctctcatatccctgggccagagacactgtgatctgctgagagtagtgcatctggtggtgcagctggaagtgttcctctttggtcactttaggaggtctgggcagcatctcaacctcttgaatggcctcaatggacacttgctggggcagcacctggaacaggctggtgatgtacatgaggatggatttcttgtcaggataggtggtgtccacatcctcagggtccagcagtttctcaattcccagctggtatctggcaatgttgaaggcatgttccagtctctgtgtggcagactgctggcacacaacagagttccagtcaaacaggtcaggtctgtggctgtggatcagggcattcagggccagtccatcactccaagaggtggtgaagttgatcacattcacttgagggtagtttctggtgctctgtctgacccagctcagcaggatcttctcagagttggtctgctgcaggccagccatgatgttcttcatcacattcttcacttgccagtgcaggatgatgttccagatcaggcccagggtcagcttgtggttgccatccacaatgtctgtgctgccaatattgaccaggtccacattgttgttctgcagcactctcagggccttgttcacattgttcagggcatgcactcttgtgctgcccttctctttaggcagcttctggcctgtcaggccttccagcagatccagcagccttctgccatcctgcaggtcactgaacaggttctcaatgtgctgcttgccaaacttgctgaactgggcattgacccatttggtgaaggttttcttctgcacatcttccctctcatagcaatcttccacctcttcccaccaaagcatggtggcgaattccgcttggcgcctcccgctcctccgggtagctcgtgggccgccgccggccccggagccttttatcgaggcgggcgggagcaccgcccggcccccaggaatgcggccccggccgagggcccgtcgccatatttgggtgtccgtgaggaaccgtcgccatatttgggtgtccaccattcctccgctctaaaaataactccccgctctaaaaataactcccccaacacctgctgcctgcccaccttcctcaccgctctaaaaataactccccaccattcctcacccgtcgccatatttgggtgtcgtgaggatggtgccgagggcggacggcctctagaggatccccattaccctgcatatgaggaacccctagtgatggagttggccactccctctctgcgcgctcgctcgctcactgaggccgggcgaccaaaggtcgcccgacgcccgggctttgcccgggcggcctcagtgagcgagcgagcgcgcagcctaattaaggccttaattaagcataaatccaacagcgtttgtataggctgtcgcccctcctgacgcggtaggaggaggggagggtgccctgcatgtctgccgctgctcttgctcttgccgctgctgaggaggggggcgcatctgccgcagcaccggatgcatctgggaaaagcaaaaaaggggctcgtccctgtttccggaggaatttgcaagcggggtcttgcatgacggggaggcaaacccccgttcgccgcagtccggccggtccgagactcgaaccgggggtcccgcgactcaacccttggaaaataaccctccggctacagggagcgagccacttaatgctttcgctttccagcctaaccgcttacgctgcgcgcggccagtggccaaaaaagctagcgcagcagccgccgcgcctggaaggaagccaaaaggagcactcccccgttgtctgacgtcgcacacctgggttcgacacgcgggcggtaaccgcatggatcacggcggacggccggatacggggctcgaaccccggtcgtccgccatgatacccttgcgaatttatccaccagaccacggaagagtgcccgcttacaggctctccttttgcacggtctagagcgtcaacgattgcgcgcgcctgaccggccagagcgtcccgaccatggagcactttttgccgctgcgcaacatctggaaccgcgtccgcgactttccgcgcgcctccaccaccgccgccggcatcacctggatgtccaggtacatctacggata

SEQ ID NO: 104 - DNA, 17353 bp, synthetic construct
  source 1..17353: mol_type = other DNA
tcgcgcgtttcggtgatgacggtgaaaacctctgacacatgcagctcccggagacggtcacagcttgtctgtaagcggatgccgggagcagacaagcccgtcagggcgcgtcagcgggtgttggcgggtgtcggggctggcttaactatgcggcatcagagcagattgtactgagagtgcaccatatgcggtgtgaaataccgcacagatgcgtaaggagaaaataccgcatcaggcgccattcgccattcaggctgcgcaactgttgggaagggcgatcggtgcgggcctcttcgctattacgccagctggcgaaagggggatgtgctgcaaggcgattaagttgggtaacgccagggttttcccagtcacgacgttgtaaaacgacggccagagaattccgcagggtctccattttgaagcgggaggtttgaacgcgcagccgccatgccggggttttacgagattgtgattaaggtccccagcgaccttgacgagcatctgcccggcatttctgacagctttgtgaactgggtggccgagaaggaatgggagttgccgccagattctgacatggatctgaatctgattgagcaggcacccctgaccgtggccgagaagctgcagcgcgactttctgacggaatggcgccgtgtgagtaaggccccggaggctcttttctttgtgcaatttgagaagggagagagctacttccacatgcacgtgctcgtggaaaccaccggggtgaaatccatggttttgggacgtttcctgagtcagattcgcgaaaaactgattcagagaatttaccgcgggatcgagccgactttgccaaactggttcgcggtcacaaagaccagaaatggcgccggaggcgggaacaaggtggtggatgagtgctacatccccaattacttgctccccaaaacccagcctgagctccagtgggcgtggactaatatggaacagtatttaagcgcctgtttgaatctcacggagcgtaaacggttggtggcgcagcatctgacgcacgtgtcgcagacgcaggagcagaacaaagagaatcagaatcccaattctgatgcgccggtgatcagatcaaaaacttcagccaggtacatggagctggtcgggtggctcgtggacaaggggattacctcggagaagcagtggatccaggaggaccaggcctcatacatctccttcaatgcggcctccaactcgcggtcccaaatcaaggctgccttggacaatgcgggaaagattatgagcctgactaaaaccgcccccgactacctggtgggccagcagcccgtggaggacatttccagcaatcggatttataaaattttggaactaaacgggtacgatccccaatatgcggcttccgtctttctgggatgggccacgaaaaagttcggcaagaggaacaccatctggctgtttgggcctgcaactaccgggaagaccaacatcgcggaggccatagcccacactgtgcccttctacgggtgcgtaaactggaccaatgagaactttcccttcaacgactgtgtcgacaagatggtgatctggtgggaggaggggaagatgaccgccaaggtcgtggagtcggccaaagccattctcggaggaagcaaggtgcgcgtggaccagaaatgcaagtcctcggcccagatagacccgactcccgtgatcgtcacctccaacaccaacatgtgcgccgtgattgacgggaactcaacgaccttcgaacaccagcagccgttgcaagaccggatgttcaaatttgaactcacccgccgtctggatcatgactttgggaaggtcaccaagcaggaagtcaaagactttttccggtgggcaaaggatcacgtggttgaggtggagcatgaattctacgtcaaaaagggtggagccaagaaaagacccgcccccagtgacgcagatataagtgagcccaaacgggtgcgcgagtcagttgcgcagccatcgacgtcagacgcggaagcttcgatcaactacgcagacaggtaccaaaacaaatgttctcgtcacgtgggcatgaatctgatgctgtttccctgcagacaatgcgagagaatgaatcagaattcaaatatctgcttcactcacggacagaaagactgtttagagtgctttcccgtgtcagaatctcaacccgtttctgtcgtcaaaaaggcgtatcagaaactgtgctacattcatcatatcatgggaaaggtgccagacgcttgcactgcctgcgatctggtcaatgtggatttggatgactgcatctttgaacaataaatgatttaaatcaggtatggctgccgatggttatcttccagattggctcgaggacaacctctctgagggcattcgcgagtggtgggcgctgaaacctggagccccgaagcccaaagccaaccagcaaaagcaggacgacggccggggtctggtgcttcctggctacaagtacctcggacccttcaacggactcgacaagggggagcccgtcaacgcggcggacgcagcggccctcgagcacgacaaggcctacgaccagcagctgcaggcgggtgacaatccgtacctgcggtataaccacgccgacgccgagtttcaggagcgtctgcaagaagatacgtcttttgggggcaacctcgggcgagcagtcttccaggccaagaagcgggttctcgaacctctcggtctggttgaggaaggcgctaagacggctcctggaaagaagagaccggtagagccatcaccccagcgttctccagactcctctacgggcatcggcaagaaaggccaacagcccgccagaaaaagactcaattttggtcagactggcgactcagagtcagttccagaccctcaacctctcggagaacctccagcagcgccctctggtgtgggacctaatacaatggctgcaggcggtggcgcaccaatggcagacaataacgaaggcgccgacggagtgggtagttcctcgggaaattggcattgcgattccacatggctgggcgacagagtcatcaccaccagcacccgaacctgggccctgcccacctacaacaaccacctctacaagcaaatctccaacgggacatcgggaggagccaccaacgacaacacctacttcggctacagcaccccctgggggtattttgactttaacagattccactgccacttttcaccacgtgactggcagcgactcatcaacaacaactggggattccggcccaagagactcagcttcaagctcttcaacatccaggtcaaggaggtcacgcagaatgaaggcaccaagaccatcgccaataacctcaccagcaccatccaggtgtttacggactcggagtaccagctgccgtacgttctcggctctgcccaccagggctgcctgcctccgttcccggcggacgtgttcatgattccccagtacggctacctaacactcaacaacggtagtcaggccgtgggacgctcctccttctactgcctggaatactttccttcgcagatgctgagaaccggcaacaacttccagtttacttacaccttcgaggacgtgcctttccacagcagctacgcccacagccagagcttggaccggctgatgaatcctctgattgaccagtacctgtactacttgtctcggactcaaacaacaggaggcacggcaaatacgcagactctgggcttcagccaaggtgggcctaatacaatggccaatcaggcaaagaactggctgccaggaccctgttaccgccaacaacgcgtctcaacgacaaccgggcaaaacaacaatagcaactttgcctggactgctgggaccaaataccatctgaatggaagaaattcattggctaatcctggcatcgctatggcaacacacaaagacgacgaggagcgtttttttcccagtaacgggatcctgatttttggcaaacaaaatgctgccagagacaatgcggattacagcgatgtcatgctcaccagcgaggaagaaatcaaaaccactaaccctgtggctacagaggaatacggtatcgtggcagataacttgcagcagcaaaacacggctcctcaaattggaactgtcaacagccagggggccttacccggtatggtctggcagaaccgggacgtgtacctgcagggtcccatctgggccaagattcctcacacggacggcaacttccacccgtctccgctgatgggcggctttggcctgaaacatcctccgcctcagatcctgatcaagaacacgcctgtacctgcggatcctccgaccaccttcaaccagtcaaagctgaactctttcatcacgcaatacagcaccggacaggtcagcgtggaaattgaatgggagctgcagaaggaaaacagcaagcgctggaaccccgagatccagtacacctccaactactacaaatctacaagtgtggactttgctgttaatacagaaggcgtgtactctgaaccccgccccattggcacccgttacctcacccgtaatctgtaattgcctgttaatcaataaaccggttgattcgtttcagttgaactttggtctctgcgaagggcgaattcgtttaaacctgcaggactagagccgaattctgcatcgcgatagggataacagggtaataaataatgtactagagacactttcaataaaggcaaatgcttttatttgtacactctcgggtgattatttacccccacccttgccgtctgcgccgttcagaagtcgaaggggttctgtctggcatcggaatgggccacgggcagagacacgttccggtactggtgcttggtggaccacttgaactcaggcacgaccattctaggcagctctgtgaagttctcgctccacaggctccgcaccatcaccagggcgttcagcaggtcaggggcgctgattttgaagtcgcagttaggtccgccgccctgggctctgctgtttctgtacacagggttgcagcactggaacacaataagagcagggtggtgcacgctggccagcacagacttgtcgctgatcaggtcggcgtcgagatcctcggcgttagacaaggcaaaaggggtcagcttgggcagctggcggcccaggaaaggggcgtggccgggcttgctattgcactcgcatctcagaggcatcagcaggtggccgtggccggtctgggcgttggggtacagggcctgcataaaggccttgatctgtttgaaggccacttgggccttggcgccttcggagaagaacatgccgcagcttttgccgctgaactggttggcggggcaggcggcgtcgtgcacacaacaccgggcgtcggtattgctgatctgcaccacgtttctgccccatctgttcttcacgatcttggccttgctgctctgctctttcagggccctctggccgttctcagaggtgacgtccatctcgatcacatgttccttgttgatcatgatgctgccgtgcagacacttcagctcgccctcgatttccgcgcatctgtgcagccacagggcacaaccggtaggctcgtggtgcttgtatgtcacctcagcaaaagattgcaggtaggcttgcaggaatctgcccatcatggtcacgaaggtcttgttggaggtaaaagtcagctgcagtcctctgtgttcctcgttcagccatgtcttgcacacggcggccagagcctcgacctgatctggcagcagcttgaaattagccttcaggtcgttgtccacgtgatacttatccatcagtgctctggcggcttccatgcccttctcccaggcggaaacgatgggcacgctcagggggttcatcacggtgatctcgctttcagcttctgaaggttcctcctcttcctcctgtgttctcatgccccgagccacggggtcgtcctcattcagtctccgcacggttctttttcctccctttccgtgcttaatcagtacaggaggattagagaagcccaccatctggagggcgacgtcctccctttcttcttcgctatccacgatcacttctgggctggggggccgttcaggctttgggctaggccgtttttttttcttcttaggggcgatagccagatcagcggcgcttgtagagggccgaggactaggggttctaggcacgagggcgtcctggctgctgtcctcctcatcctcgctctcgatccgtctccgcattctcttcttagggggggcccgcggagggggagggctagggctaggggacgacacatcttccatggttggaggtctgcgagcagcgcctctgcctctctctggtgttgtctcgcgctgttcttcctctctagaggccatttccttctcctataggcagaaaaagatcgttgaaactcactccggggctgtggacgtcggcttaccttcgcaaatttgtacctgaggactaccacgcccacgagattaggttctacgaagaccaatcccgcccgcctaatgcggagcttaccgcctgcgtcattacccagggccacattcttggccaattgcaagccatcaacaaagcccgccaagagtttctgctacgaaagggacggggggtttacttggacccccagtccggcgaggagctcaacccaatccccccgccgccgcagccctatcagcagcagccgcgggcccttgcttcccaggatggcacccaaaaagaagctgcagctgccgccgccacccacggacgaggaggaatactgggacagtcaggcagaggaggttttggacgaggaggaggaggacatgatggaagactgggagagcctagacgaggaagcttccgaggtcgaagaggtgtcagacgaaacaccgtcaccctcggtcgcattcccctcgccggcgccccagaaatcggcaaccggttccagcatggctacaacctccgctcctcaggcgccgccggcactgcccgttcgccgacccaaccgtagatgggacaccactggaaccagggccggtaagtccaagcagccgccgccgttagcccaagagcaacaacagcgccaaggctaccgctcatggcgcgggcacaagaacgccatagttgcttgcttgcaagactgtgggggcaacatctccttcgcccgccgctttcttctctaccatcacggcgtggccttcccccgtaacatcctgcattactaccgtcatctctacagcccatactgcaccggcggcagcggcagcaacagcagcggccacacagaagcaaaggcgaccggatagcaagactctgacaaagcccaagaaatccacagcggcggcagcagcaggaggaggagcgctgcgtctggcgcccaacgaacccgtatcgacccgcgagcttagaaacaggatttttcccactctgtatgctatatttcaacagagcaggggccaagaacaagagctgaaaataaaaaacaggtctctgcgatccctcacccgcagctgcctgtatcacaaaagcgaagatcagcttcggcgcacgctggaagacgcggaggctctcttcagtaaatactgcgcgctgactcttaaggactagtttcgcgccctttctcaaatttaagcgcgaaaactacgtcatctccagcggccacacccggcgccagcacctgttgtcagcgccattttttagggcggagtaacttgtatgtgttgggaattgtagttttcttaaaatgggaagtgacgtaacgtgggaaaacggaagtgacgatttgaggaagttgtgggttttttggctttcgtttctgggcgtaggttcgcgtgcggttttctgggtgttttttgtggactttaaccgttacgtcattttttagtcctatatatactcgctctgcacttggcccttttttacactgtgactgattgagctggtgccgtgtcgagtggtgtttttttaataggttttcttttttactggtaaggctgactgttatgactacgtccggcgttccatttggcatgacactacgaccaacacgatctcggttgtctcggcgcactccgtacagtagggatcgtctacctccttttgagacagaaacccgcgctaccatactggaggatcatccgctgctgcccgaatgtaacactttgacaatgcacaacgtgagttacgtgcgaggtcttccctgcagtgtgggatttacgctgattcaggaatgggttgttccctgggatatggttctaacgcgggaggagcttgtaatcctgaggaagtgtatgcacgtgtgcctgtgttgtgccaacattgatatcatgacgagcatgatgatccatggttacgagtcctgggctctccactgtcattgttccagtcccggttccctgcagtgtatagccggcgggcaggttttggccagctggtttaggatggtggtggatggcgccatgtttaatcagaggtttatatggtaccgggaggtggtgaattacaacatgccaaaagaggtaatgtttatgtccagcgtgtttatgaggggtcgccacttaatctacctgcgcttgtggtatgatggccacgtgggttctgtggtccccgccatgagctttggatacagcgccttgcactgtgggattttgaacaatattgtggtgctgtgctgcagttactgtgctgatttaagtgagatcagggtgcgctgctgtgcccggaggacaaggcgccttatgctgcgggcggtgcgaatcatcgctgaggagaccactgccatgttgtattcctgcaggacggagcggcggcggcagcagtttattcgcgcgctgctgcagcaccaccgccctatcctgatgcacgattatgactctacccccatgtaggcgtggacttctccttcgccgcccgttaagcaaccgcaagttggacagcagcctgtggctcagcagctggacagcgacatgaacttaagtgagctgcccggggagtttattaatatcactgatgagcgtttggctcgacaggaaaccgtgtggaatataacacctaagaatatgtctgttacccatgatatgatgctttttaaggccagccggggagaaaggactgtgtactctgtgtgttgggagggaggtggcaggttgaatactagggttctgtgagtttgattaaggtacggtgatctgtataagctatgtggtggtggggctatactactgaatgaaaaatgacttgaaattttctgcaattgaaaaataaacacgttgaaacataacacaaacgattctttattcttgggcaatgtatgaaaaagtgtaagaggatgtggcaaatatttcattaatgtagttgtggccagaccagtcccatgaaaatgacatagagtatgcacttggagttgtgtctcctgtttcctgtgtaccgtttagtgtaatggttagtgttacaggtttagttttgtctccgtttaagtaaacttgactgacaatgttacttttggcagttttaccgtgagattttggataagctgataggttagttaattaaggccttaattaggctgcgcgctcgctcgctcactgaggccgcccgggcaaagcccgggcgtcgggcgacctttggtcgcccggcctcagtgagcgagcgagcgcgcagagagggagtggccaactccatcactaggggttcctcatatgcagggtaatggggatcctctagaggccgtccgccctcggcaccatcctcacgacacccaaatatggcgacgggtgaggaatggtggggagttatttttagagcggtgaggaaggtgggcaggcagcaggtgttgggggagttatttttagagcggggagttatttttagagcggaggaatggtggacacccaaatatggcgacggttcctcacggacacccaaatatggcgacgggccctcggccggggccgcattcctgggggccgggcggtgctcccgcccgcctcgataaaaggctccggggccggcggcggcccacgagctacccggaggagcgggaggcgccaagcggaattcgccaccatgctttggtgggaagaggtggaagattgctatgagagggaagatgtgcagaagaaaaccttcaccaaatgggtcaatgcccagttcagcaagtttggcaagcagcacattgagaacctgttcagtgacctgcaggatggcagaaggctgctggatctgctggaaggcctgacaggccagaagctgcctaaagagaagggcagcacaagagtgcatgccctgaacaatgtgaacaaggccctgagagtgctgcagaacaacaatgtggacctggtcaatattggcagcacagacattgtggatggcaaccacaagctgaccctgggcctgatctggaacatcatcctgcactggcaagtgaagaatgtgatgaagaacatcatggctggcctgcagcagaccaactctgagaagatcctgctgagctgggtcagacagagcaccagaaactaccctcaagtgaatgtgatcaacttcaccacctcttggagtgatggactggccctgaatgccctgatccacagccacagacctgacctgtttgactggaactctgttgtgtgccagcagtctgccacacagagactggaacatgccttcaacattgccagataccagctgggaattgagaaactgctggaccctgaggatgtggacaccacctatcctgacaagaaatccatcctcatgtacatcaccagcctgttccaggtgctgccccagcaagtgtccattgaggccattcaagaggttgagatgctgcccagacctcctaaagtgaccaaagaggaacacttccagctgcaccaccagatgcactactctcagcagatcacagtgtctctggcccagggatatgagagaacaagcagccccaagcctaggttcaagagctatgcctacacacaggctgcctatgtgaccacatctgaccccacaagaagcccatttccaagccagcatctggaagcccctgaggacaagagctttggcagcagcctgatggaatctgaagtgaacctggatagataccagacagccctggaagaagtgctgtcctggctgctgtctgctgaggatacactgcaggctcagggtgaaatcagcaatgatgtggaagtggtcaaggaccagtttcacacccatgagggctacatgatggacctgacagcccaccagggcagagtgggaaatatcctgcagctgggctccaagctgattggcacaggcaagctgtctgaggatgaagagacagaggtgcaagagcagatgaacctgctgaacagcagatgggagtgtctgagagtggccagcatggaaaagcagagcaacctgcacagagtgctcatggacctgcagaatcagaaactgaaagaactgaatgactggctgaccaagacagaagaaaggactaggaagatggaagaggaacctctgggaccagacctggaagatctgaaaagacaggtgcagcagcataaggtgctgcaagaggaccttgagcaagagcaagtcagagtgaacagcctgacacacatggtggtggttgtggatgagtcctctggggatcatgccacagctgctctggaagaacagctgaaggtgctgggagacagatgggccaacatctgtaggtggacagaggatagatgggtgctgctccaggacattctgctgaagtggcagagactgacagaggaacagtgcctgttttctgcctggctctctgagaaagaggatgctgtcaacaagatccataccacaggcttcaaggatcagaatgagatgctcagctccctgcagaaactggctgtgctgaaggctgacctggaaaagaaaaagcagtccatgggcaagctctacagcctgaagcaggacctgctgtctaccctgaagaacaagtctgtgacccagaaaactgaggcctggctggacaactttgctagatgctgggacaacctggtgcagaagctggaaaagtctacagcccagatcagccagcaacctgatcttgcccctggcctgaccacaattggagcctctccaacacagactgtgaccctggttacccagccagtggtcaccaaagagacagccatcagcaaactggaaatgcccagctctctgatgctggaagtccccacactggaaaggctgcaagaacttcaagaggccacagatgagctggacctgaagctgagacaggctgaagtgatcaaaggcagctggcagccagttggggacctgctcattgatagcctgcaggaccatctggaaaaagtgaaagccctgaggggagagattgcccctctgaaagaaaatgtgtcccatgtgaatgacctggccagacagctgaccacactgggaatccagctgagcccctacaacctgagcacccttgaggacctgaacaccaggtggaagctcctccaggtggcagtggaagatagagtcaggcagctgcatgaggcccacagagattttggaccagccagccagcactttctgtctacctctgtgcaaggcccctgggagagagctatctctcctaacaaggtgccctactacatcaaccatgagacacagaccacctgttgggatcaccccaagatgacagagctgtaccagagtctggcagacctcaacaatgtcagattcagtgcctacaggactgccatgaagctcagaaggctccagaaagctctgtgcctggacctgctttccctgagtgcagcttgtgatgccctggaccagcacaatctgaagcagaatgaccagcctatggacatcctccagatcatcaactgcctcaccaccatctatgataggctggaacaagagcacaacaatctggtcaatgtgcccctgtgtgtggacatgtgcctgaattggctgctgaatgtgtatgacacaggcagaacaggcaggatcagagtcctgtccttcaagacaggcatcatctccctgtgcaaagcccacttggaggacaagtacagatacctgttcaagcaagtggcctccagcacaggcttttgtgaccagagaaggctgggcctgctcctgcatgacagcattcagatccctagacagctgggagaagtggcttcctttggaggcagcaatattgagccatcagtcaggtcctgttttcagtttgccaacaacaagcctgagattgaggctgccctgttcctggactggatgagacttgagcctcagagcatggtctggctgcctgtgcttcatagagtggctgctgctgagactgccaagcaccaggccaagtgcaacatctgcaaagagtgccccatcattggcttcagatacagatccctgaagcacttcaactatgatatctgccagagctgcttctttagtggcagggttgccaagggccacaaaatgcactaccccatggtggaatactgcaccccaacaacctctggggaagatgttagagactttgccaaggtgctgaaaaacaagttcaggaccaagagatactttgctaagcaccccagaatgggctacctgcctgtccagacagtgcttgagggtgacaacatggaaacccctgtgacactgatcaatttctggccagtggactctgcccctgcctcaagtccacagctgtcccatgatgacacccacagcagaattgagcactatgcctccagactggcagagatggaaaacagcaatggcagctacctgaatgatagcatcagccccaatgagagcattgatgatgagcatctgctgatccagcactactgtcagtccctgaaccaggactctccactgagccagcctagaagccctgctcagatcctgatcagccttgagtctgaggaaaggggagagctggaaagaatcctggcagatcttgaggaagagaacagaaacctgcaggcagagtatgacaggctcaaacagcagcatgagcacaagggactgagccctctgccttctcctcctgaaatgatgcccacctctccacagtctccaaggtgatgactcgagaggcctaataaagagctcagatgcatcgatcagagtgtgttggttttttgtgtgccagggtaatgggctagctgcggccgcaggaacccctagtgatggagttggccactccctctctgcgcgctcgctcgctcactgaggccgggcgaccaaaggtcgcccgacgcccgggctttgcccgggcggcctcagtgagcgagcgagcgcgcagccttaattaagcataaatccaacagcgtttgtataggctgtcgcccctcctgacgcggtaggaggaggggagggtgccctgcatgtctgccgctgctcttgctcttgccgctgctgaggaggggggcgcatctgccgcagcaccggatgcatctgggaaaagcaaaaaaggggctcgtccctgtttccggaggaatttgcaagcggggtcttgcatgacggggaggcaaacccccgttcgccgcagtccggccggtccgagactcgaaccgggggtcccgcgactcaacccttggaaaataaccctccggctacagggagcgagccacttaatgctttcgctttccagcctaaccgcttacgctgcgcgcggccagtggccaaaaaagctagcgcagcagccgccgcgcctggaaggaagccaaaaggagcactcccccgttgtctgacgtcgcacacctgggttcgacacgcgggcggtaaccgcatggatcacggcggacggccggatacggggctcgaaccccggtcgtccgccatgatacccttgcgaatttatccaccagaccacggaagagtgcccgcttacaggctctccttttgcacggtctagagcgtcaacgattgcgcgcgcctgaccggccagagcgtcccgaccatggagcactttttgccgctgcgcaacatctggaaccgcgtccgcgactttccgcgcgcctccaccaccgccgccggcatcacctggatgtccaggtacatctacggatatggcaaacagctattatgggtattatgggtgcggccgcggatcccgggcccgtcgactgcagaggcctgcatgcaagcttggtgtaatcatggtcatagctgtttcctgtgtgaaattgttatccgctcacaattccacacaacatacgagccggaagcataaagtgtaaagcctggggtgcctaatgagtgagctaactcacattaattgcgttgcgctcactgcccgctttccagtcgggaaacctgtcgtgccagctgcattaatgaatcggccaacgcgcggggagaggcggtttgcgtattgggcgctcttccgcttcctcgctcactgactcgctgcgctcggtcgttcggctgcggcgagcggtatcagctcactcaaaggcggtaatacggttatccacagaatcaggggataacgcaggaaagaacatgtgagcaaaaggccagcaaaaggccaggaaccgtaaaaaggccgcgttgctggcgtttttccataggctccgcccccctgacgagcatcacaaaaatcgacgctcaagtcagaggtggcgaaacccgacaggactataaagataccaggcgtttccccctggaagctccctcgtgcgctctcctgttccgaccctgccgcttaccggatacctgtccgcctttctcccttcgggaagcgtggcgctttctcatagctcacgctgtaggtatctcagttcggtgtaggtcgttcgctccaagctgggctgtgtgcacgaaccccccgttcagcccgaccgctgcgccttatccggtaactatcgtcttgagtccaacccggtaagacacgacttatcgccactggcagcagccactggtaacaggattagcagagcgaggtatgtaggcggtgctacagagttcttgaagtggtggcctaactacggctacactagaagaacagtatttggtatctgcgctctgctgaagccagttaccttcggaaaaagagttggtagctcttgatccggcaaacaaaccaccgctggtagcggtggtttttttgtttgcaagcagcagattacgcgcagaaaaaaaggatctcaagaagatcctttgatcttttctacggggtctgacgctcagtggaacgaaaactcacgttaagggattttggtcatgagattatcaaaaaggatcttcacctagaaggtcctgtattagaggtcacgtgagtgttttgcgacattttgcgacaccatgtggtcacgctgggtatttaagcccgagtgagcacgcagggtctccattttgaagcgggaggtttgaacgcgcagccgccatccttttaaattaaaaatgaagttttaaatcaagcccaatctgaataatgttacaaccaattaaccaattctgattagaaaaactcatcgagcatcaaatgaaactgcaatttattcatatcaggattatcaataccatatttttgaaaaagccgtttctgtaatgaaggagaaaactcaccgaggcagttccataggatggcaagatcctggtatcggtctgcgattccgactcgtccaacatcaatacaacctattaatttcccctcgtcaaaaataaggttatcaagtgagaaatcaccatgagtgacgactgaatccggtgagaatggcaaaagtttatgcatttctttccagacttgttcaacaggccagccattacgctcgtcatcaaaatcactcgcatcaaccaaaccgttattcattcgtgattgcgcctgagcgagacgaaatacgcgatcgctgttaaaaggacaattacaaacaggaatcgaatgcaaccggcgcaggaacactgccagcgcatcaacaatattttcacctgaatcaggatattcttctaatacctggaatgctgtttttccggggatcgcagtggtgagtaaccatgcatcatcaggagtacggataaaatgcttgatggtcggaagaggcataaattccgtcagccagtttagtctgaccatctcatctgtaacatcattggcaacgctacctttgccatgtttcagaaacaactctggcgcatcgggcttcccatacaagcgatagattgtcgcacctgattgcccgacattatcgcgagcccatttatacccatataaatcagcatccatgttggaatttaatcgcggcctcgacgtttcccgttgaatatggctcataacaccccttgtattactgtttatgtaagcagacagttttattgttcatgatgatatatttttatcttgtgcaatgtaacatcagagattttgagacacgggccagagctgca

SEQ ID NO: 105 - DNA, 17353 bp, synthetic construct
  source 1..17353: mol_type = other DNA
tcgcgcgtttcggtgatgacggtgaaaacctctgacacatgcagctcccggagacggtcacagcttgtctgtaagcggatgccgggagcagacaagcccgtcagggcgcgtcagcgggtgttggcgggtgtcggggctggcttaactatgcggcatcagagcagattgtactgagagtgcaccatatgcggtgtgaaataccgcacagatgcgtaaggagaaaataccgcatcaggcgccattcgccattcaggctgcgcaactgttgggaagggcgatcggtgcgggcctcttcgctattacgccagctggcgaaagggggatgtgctgcaaggcgattaagttgggtaacgccagggttttcccagtcacgacgttgtaaaacgacggccagagaattccgcagggtctccattttgaagcgggaggtttgaacgcgcagccgccatgccggggttttacgagattgtgattaaggtccccagcgaccttgacgagcatctgcccggcatttctgacagctttgtgaactgggtggccgagaaggaatgggagttgccgccagattctgacatggatctgaatctgattgagcaggcacccctgaccgtggccgagaagctgcagcgcgactttctgacggaatggcgccgtgtgagtaaggccccggaggctcttttctttgtgcaatttgagaagggagagagctacttccacatgcacgtgctcgtggaaaccaccggggtgaaatccatggttttgggacgtttcctgagtcagattcgcgaaaaactgattcagagaatttaccgcgggatcgagccgactttgccaaactggttcgcggtcacaaagaccagaaatggcgccggaggcgggaacaaggtggtggatgagtgctacatccccaattacttgctccccaaaacccagcctgagctccagtgggcgtggactaatatggaacagtatttaagcgcctgtttgaatctcacggagcgtaaacggttggtggcgcagcatctgacgcacgtgtcgcagacgcaggagcagaacaaagagaatcagaatcccaattctgatgcgccggtgatcagatcaaaaacttcagccaggtacatggagctggtcgggtggctcgtggacaaggggattacctcggagaagcagtggatccaggaggaccaggcctcatacatctccttcaatgcggcctccaactcgcggtcccaaatcaaggctgccttggacaatgcgggaaagattatgagcctgactaaaaccgcccccgactacctggtgggccagcagcccgtggaggacatttccagcaatcggatttataaaattttggaactaaacgggtacgatccccaatatgcggcttccgtctttctgggatgggccacgaaaaagttcggcaagaggaacaccatctggctgtttgggcctgcaactaccgggaagaccaacatcgcggaggccatagcccacactgtgcccttctacgggtgcgtaaactggaccaatgagaactttcccttcaacgactgtgtcgacaagatggtgatctggtgggaggaggggaagatgaccgccaaggtcgtggagtcggccaaagccattctcggaggaagcaaggtgcgcgtggaccagaaatgcaagtcctcggcccagatagacccgactcccgtgatcgtcacctccaacaccaacatgtgcgccgtgattgacgggaactcaacgaccttcgaacaccagcagccgttgcaagaccggatgttcaaatttgaactcacccgccgtctggatcatgactttgggaaggtcaccaagcaggaagtcaaagactttttccggtgggcaaaggatcacgtggttgaggtggagcatgaattctacgtcaaaaagggtggagccaagaaaagacccgcccccagtgacgcagatataagtgagcccaaacgggtgcgcgagtcagttgcgcagccatcgacgtcagacgcggaagcttcgatcaactacgcagacaggtaccaaaacaaatgttctcgtcacgtgggcatgaatctgatgctgtttccctgcagacaatgcgagagaatgaatcagaattcaaatatctgcttcactcacggacagaaagactgtttagagtgctttcccgtgtcagaatctcaacccgtttctgtcgtcaaaaaggcgtatcagaaactgtgctacattcatcatatcatgggaaaggtgccagacgcttgcactgcctgcgatctggtcaatgtggatttggatgactgcatctttgaacaataaatgatttaaatcaggtatggctgccgatggttatcttccagattggctcgaggacaacctctctgagggcattcgcgagtggtgggcgctgaaacctggagccccgaagcccaaagccaaccagcaaaagcaggacgacggccggggtctggtgcttcctggctacaagtacctcggacccttcaacggactcgacaagggggagcccgtcaacgcggcggacgcagcggccctcgagcacgacaaggcctacgaccagcagctgcaggcgggtgacaatccgtacctgcggtataaccacgccgacgccgagtttcaggagcgtctgcaagaagatacgtcttttgggggcaacctcgggcgagcagtcttccaggccaagaagcgggttctcgaacctctcggtctggttgaggaaggcgctaagacggctcctggaaagaagagaccggtagagccatcaccccagcgttctccagactcctctacgggcatcggcaagaaaggccaacagcccgccagaaaaagactcaattttggtcagactggcgactcagagtcagttccagaccctcaacctctcggagaacctccagcagcgccctctggtgtgggacctaatacaatggctgcaggcggtggcgcaccaatggcagacaataacgaaggcgccgacggagtgggtagttcctcgggaaattggcattgcgattccacatggctgggcgacagagtcatcaccaccagcacccgaacctgggccctgcccacctacaacaaccacctctacaagcaaatctccaacgggacatcgggaggagccaccaacgacaacacctacttcggctacagcaccccctgggggtattttgactttaacagattccactgccacttttcaccacgtgactggcagcgactcatcaacaacaactggggattccggcccaagagactcagcttcaagctcttcaacatccaggtcaaggaggtcacgcagaatgaaggcaccaagaccatcgccaataacctcaccagcaccatccaggtgtttacggactcggagtaccagctgccgtacgttctcggctctgcccaccagggctgcctgcctccgttcccggcggacgtgttcatgattccccagtacggctacctaacactcaacaacggtagtcaggccgtgggacgctcctccttctactgcctggaatactttccttcgcagatgctgagaaccggcaacaacttccagtttacttacaccttcgaggacgtgcctttccacagcagctacgcccacagccagagcttggaccggctgatgaatcctctgattgaccagtacctgtactacttgtctcggactcaaacaacaggaggcacggcaaatacgcagactctgggcttcagccaaggtgggcctaatacaatggccaatcaggcaaagaactggctgccaggaccctgttaccgccaacaacgcgtctcaacgacaaccgggcaaaacaacaatagcaactttgcctggactgctgggaccaaataccatctgaatggaagaaattcattggctaatcctggcatcgctatggcaacacacaaagacgacgaggagcgtttttttcccagtaacgggatcctgatttttggcaaacaaaatgctgccagagacaatgcggattacagcgatgtcatgctcaccagcgaggaagaaatcaaaaccactaaccctgtggctacagaggaatacggtatcgtggcagataacttgcagcagcaaaacacggctcctcaaattggaactgtcaacagccagggggccttacccggtatggtctggcagaaccgggacgtgtacctgcagggtcccatctgggccaagattcctcacacggacggcaacttccacccgtctccgctgatgggcggctttggcctgaaacatcctccgcctcagatcctgatcaagaacacgcctgtacctgcggatcctccgaccaccttcaaccagtcaaagctgaactctttcatcacgcaatacagcaccggacaggtcagcgtggaaattgaatgggagctgcagaaggaaaacagcaagcgctggaaccccgagatccagtacacctccaactactacaaatctacaagtgtggactttgctgttaatacagaaggcgtgtactctgaaccccgccccattggcacccgttacctcacccgtaatctgtaattgcctgttaatcaataaaccggttgattcgtttcagttgaactttggtctctgcgaagggcgaattcgtttaaacctgcaggactagagccgaattctgcatcgcgatagggataacagggtaataaataatgtactagagacactttcaataaaggcaaatgcttttatttgtacactctcgggtgattatttacccccacccttgccgtctgcgccgttcagaagtcgaaggggttctgtctggcatcggaatgggccacgggcagagacacgttccggtactggtgcttggtggaccacttgaactcaggcacgaccattctaggcagctctgtgaagttctcgctccacaggctccgcaccatcaccagggcgttcagcaggtcaggggcgctgattttgaagtcgcagttaggtccgccgccctgggctctgctgtttctgtacacagggttgcagcactggaacacaataagagcagggtggtgcacgctggccagcacagacttgtcgctgatcaggtcggcgtcgagatcctcggcgttagacaaggcaaaaggggtcagcttgggcagctggcggcccaggaaaggggcgtggccgggcttgctattgcactcgcatctcagaggcatcagcaggtggccgtggccggtctgggcgttggggtacagggcctgcataaaggccttgatctgtttgaaggccacttgggccttggcgccttcggagaagaacatgccgcagcttttgccgctgaactggttggcggggcaggcggcgtcgtgcacacaacaccgggcgtcggtattgctgatctgcaccacgtttctgccccatctgttcttcacgatcttggccttgctgctctgctctttcagggccctctggccgttctcagaggtgacgtccatctcgatcacatgttccttgttgatcatgatgctgccgtgcagacacttcagctcgccctcgatttccgcgcatctgtgcagccacagggcacaaccggtaggctcgtggtgcttgtatgtcacctcagcaaaagattgcaggtaggcttgcaggaatctgcccatcatggtcacgaaggtcttgttggaggtaaaagtcagctgcagtcctctgtgttcctcgttcagccatgtcttgcacacggcggccagagcctcgacctgatctggcagcagcttgaaattagccttcaggtcgttgtccacgtgatacttatccatcagtgctctggcggcttccatgcccttctcccaggcggaaacgatgggcacgctcagggggttcatcacggtgatctcgctttcagcttctgaaggttcctcctcttcctcctgtgttctcatgccccgagccacggggtcgtcctcattcagtctccgcacggttctttttcctccctttccgtgcttaatcagtacaggaggattagagaagcccaccatctggagggcgacgtcctccctttcttcttcgctatccacgatcacttctgggctggggggccgttcaggctttgggctaggccgtttttttttcttcttaggggcgatagccagatcagcggcgcttgtagagggccgaggactaggggttctaggcacgagggcgtcctggctgctgtcctcctcatcctcgctctcgatccgtctccgcattctcttcttagggggggcccgcggagggggagggctagggctaggggacgacacatcttccatggttggaggtctgcgagcagcgcctctgcctctctctggtgttgtctcgcgctgttcttcctctctagaggccatttccttctcctataggcagaaaaagatcgttgaaactcactccggggctgtggacgtcggcttaccttcgcaaatttgtacctgaggactaccacgcccacgagattaggttctacgaagaccaatcccgcccgcctaatgcggagcttaccgcctgcgtcattacccagggccacattcttggccaattgcaagccatcaacaaagcccgccaagagtttctgctacgaaagggacggggggtttacttggacccccagtccggcgaggagctcaacccaatccccccgccgccgcagccctatcagcagcagccgcgggcccttgcttcccaggatggcacccaaaaagaagctgcagctgccgccgccacccacggacgaggaggaatactgggacagtcaggcagaggaggttttggacgaggaggaggaggacatgatggaagactgggagagcctagacgaggaagcttccgaggtcgaagaggtgtcagacgaaacaccgtcaccctcggtcgcattcccctcgccggcgccccagaaatcggcaaccggttccagcatggctacaacctccgctcctcaggcgccgccggcactgcccgttcgccgacccaaccgtagatgggacaccactggaaccagggccggtaagtccaagcagccgccgccgttagcccaagagcaacaacagcgccaaggctaccgctcatggcgcgggcacaagaacgccatagttgcttgcttgcaagactgtgggggcaacatctccttcgcccgccgctttcttctctaccatcacggcgtggccttcccccgtaacatcctgcattactaccgtcatctctacagcccatactgcaccggcggcagcggcagcaacagcagcggccacacagaagcaaaggcgaccggatagcaagactctgacaaagcccaagaaatccacagcggcggcagcagcaggaggaggagcgctgcgtctggcgcccaacgaacccgtatcgacccgcgagcttagaaacaggatttttcccactctgtatgctatatttcaacagagcaggggccaagaacaagagctgaaaataaaaaacaggtctctgcgatccctcacccgcagctgcctgtatcacaaaagcgaagatcagcttcggcgcacgctggaagacgcggaggctctcttcagtaaatactgcgcgctgactcttaaggactagtttcgcgccctttctcaaatttaagcgcgaaaactacgtcatctccagcggccacacccggcgccagcacctgttgtcagcgccattttttagggcggagtaacttgtatgtgttgggaattgtagttttcttaaaatgggaagtgacgtaacgtgggaaaacggaagtgacgatttgaggaagttgtgggttttttggctttcgtttctgggcgtaggttcgcgtgcggttttctgggtgttttttgtggactttaaccgttacgtcattttttagtcctatatatactcgctctgcacttggcccttttttacactgtgactgattgagctggtgccgtgtcgagtggtgtttttttaataggttttcttttttactggtaaggctgactgttatgactacgtccggcgttccatttggcatgacactacgaccaacacgatctcggttgtctcggcgcactccgtacagtagggatcgtctacctccttttgagacagaaacccgcgctaccatactggaggatcatccgctgctgcccgaatgtaacactttgacaatgcacaacgtgagttacgtgcgaggtcttccctgcagtgtgggatttacgctgattcaggaatgggttgttccctgggatatggttctaacgcgggaggagcttgtaatcctgaggaagtgtatgcacgtgtgcctgtgttgtgccaacattgatatcatgacgagcatgatgatccatggttacgagtcctgggctctccactgtcattgttccagtcccggttccctgcagtgtatagccggcgggcaggttttggccagctggtttaggatggtggtggatggcgccatgtttaatcagaggtttatatggtaccgggaggtggtgaattacaacatgccaaaagaggtaatgtttatgtccagcgtgtttatgaggggtcgccacttaatctacctgcgcttgtggtatgatggccacgtgggttctgtggtccccgccatgagctttggatacagcgccttgcactgtgggattttgaacaatattgtggtgctgtgctgcagttactgtgctgatttaagtgagatcagggtgcgctgctgtgcccggaggacaaggcgccttatgctgcgggcggtgcgaatcatcgctgaggagaccactgccatgttgtattcctgcaggacggagcggcggcggcagcagtttattcgcgcgctgctgcagcaccaccgccctatcctgatgcacgattatgactctacccccatgtaggcgtggacttctccttcgccgcccgttaagcaaccgcaagttggacagcagcctgtggctcagcagctggacagcgacatgaacttaagtgagctgcccggggagtttattaatatcactgatgagcgtttggctcgacaggaaaccgtgtggaatataacacctaagaatatgtctgttacccatgatatgatgctttttaaggccagccggggagaaaggactgtgtactctgtgtgttgggagggaggtggcaggttgaatactagggttctgtgagtttgattaaggtacggtgatctgtataagctatgtggtggtggggctatactactgaatgaaaaatgacttgaaattttctgcaattgaaaaataaacacgttgaaacataacacaaacgattctttattcttgggcaatgtatgaaaaagtgtaagaggatgtggcaaatatttcattaatgtagttgtggccagaccagtcccatgaaaatgacatagagtatgcacttggagttgtgtctcctgtttcctgtgtaccgtttagtgtaatggttagtgttacaggtttagttttgtctccgtttaagtaaacttgactgacaatgttacttttggcagttttaccgtgagattttggataagctgataggttagttaattaaggctgcgcgctcgctcgctcactgaggccgcccgggcaaagcccgggcgtcgggcgacctttggtcgcccggcctcagtgagcgagcgagcgcgcagagagggagtggccaactccatcactaggggttcctgcggccgcagctagcccattaccctggcacacaaaaaaccaacacactctgatcgatgcatctgagctctttattaggcctctcgagtcatcaccttggagactgtggagaggtgggcatcatttcaggaggagaaggcagagggctcagtcccttgtgctcatgctgctgtttgagcctgtcatactctgcctgcaggtttctgttctcttcctcaagatctgccaggattctttccagctctcccctttcctcagactcaaggctgatcaggatctgagcagggcttctaggctggctcagtggagagtcctggttcagggactgacagtagtgctggatcagcagatgctcatcatcaatgctctcattggggctgatgctatcattcaggtagctgccattgctgttttccatctctgccagtctggaggcatagtgctcaattctgctgtgggtgtcatcatgggacagctgtggacttgaggcaggggcagagtccactggccagaaattgatcagtgtcacaggggtttccatgttgtcaccctcaagcactgtctggacaggcaggtagcccattctggggtgcttagcaaagtatctcttggtcctgaacttgtttttcagcaccttggcaaagtctctaacatcttccccagaggttgttggggtgcagtattccaccatggggtagtgcattttgtggcccttggcaaccctgccactaaagaagcagctctggcagatatcatagttgaagtgcttcagggatctgtatctgaagccaatgatggggcactctttgcagatgttgcacttggcctggtgcttggcagtctcagcagcagccactctatgaagcacaggcagccagaccatgctctgaggctcaagtctcatccagtccaggaacagggcagcctcaatctcaggcttgttgttggcaaactgaaaacaggacctgactgatggctcaatattgctgcctccaaaggaagccacttctcccagctgtctagggatctgaatgctgtcatgcaggagcaggcccagccttctctggtcacaaaagcctgtgctggaggccacttgcttgaacaggtatctgtacttgtcctccaagtgggctttgcacagggagatgatgcctgtcttgaaggacaggactctgatcctgcctgttctgcctgtgtcatacacattcagcagccaattcaggcacatgtccacacacaggggcacattgaccagattgttgtgctcttgttccagcctatcatagatggtggtgaggcagttgatgatctggaggatgtccataggctggtcattctgcttcagattgtgctggtccagggcatcacaagctgcactcagggaaagcaggtccaggcacagagctttctggagccttctgagcttcatggcagtcctgtaggcactgaatctgacattgttgaggtctgccagactctggtacagctctgtcatcttggggtgatcccaacaggtggtctgtgtctcatggttgatgtagtagggcaccttgttaggagagatagctctctcccaggggccttgcacagaggtagacagaaagtgctggctggctggtccaaaatctctgtgggcctcatgcagctgcctgactctatcttccactgccacctggaggagcttccacctggtgttcaggtcctcaagggtgctcaggttgtaggggctcagctggattcccagtgtggtcagctgtctggccaggtcattcacatgggacacattttctttcagaggggcaatctctcccctcagggctttcactttttccagatggtcctgcaggctatcaatgagcaggtccccaactggctgccagctgcctttgatcacttcagcctgtctcagcttcaggtccagctcatctgtggcctcttgaagttcttgcagcctttccagtgtggggacttccagcatcagagagctgggcatttccagtttgctgatggctgtctctttggtgaccactggctgggtaaccagggtcacagtctgtgttggagaggctccaattgtggtcaggccaggggcaagatcaggttgctggctgatctgggctgtagacttttccagcttctgcaccaggttgtcccagcatctagcaaagttgtccagccaggcctcagttttctgggtcacagacttgttcttcagggtagacagcaggtcctgcttcaggctgtagagcttgcccatggactgctttttcttttccaggtcagccttcagcacagccagtttctgcagggagctgagcatctcattctgatccttgaagcctgtggtatggatcttgttgacagcatcctctttctcagagagccaggcagaaaacaggcactgttcctctgtcagtctctgccacttcagcagaatgtcctggagcagcacccatctatcctctgtccacctacagatgttggcccatctgtctcccagcaccttcagctgttcttccagagcagctgtggcatgatccccagaggactcatccacaaccaccaccatgtgtgtcaggctgttcactctgacttgctcttgctcaaggtcctcttgcagcaccttatgctgctgcacctgtcttttcagatcttccaggtctggtcccagaggttcctcttccatcttcctagtcctttcttctgtcttggtcagccagtcattcagttctttcagtttctgattctgcaggtccatgagcactctgtgcaggttgctctgcttttccatgctggccactctcagacactcccatctgctgttcagcaggttcatctgctcttgcacctctgtctcttcatcctcagacagcttgcctgtgccaatcagcttggagcccagctgcaggatatttcccactctgccctggtgggctgtcaggtccatcatgtagccctcatgggtgtgaaactggtccttgaccacttccacatcattgctgatttcaccctgagcctgcagtgtatcctcagcagacagcagccaggacagcacttcttccagggctgtctggtatctatccaggttcacttcagattccatcaggctgctgccaaagctcttgtcctcaggggcttccagatgctggcttggaaatgggcttcttgtggggtcagatgtggtcacataggcagcctgtgtgtaggcatagctcttgaacctaggcttggggctgcttgttctctcatatccctgggccagagacactgtgatctgctgagagtagtgcatctggtggtgcagctggaagtgttcctctttggtcactttaggaggtctgggcagcatctcaacctcttgaatggcctcaatggacacttgctggggcagcacctggaacaggctggtgatgtacatgaggatggatttcttgtcaggataggtggtgtccacatcctcagggtccagcagtttctcaattcccagctggtatctggcaatgttgaaggcatgttccagtctctgtgtggcagactgctggcacacaacagagttccagtcaaacaggtcaggtctgtggctgtggatcagggcattcagggccagtccatcactccaagaggtggtgaagttgatcacattcacttgagggtagtttctggtgctctgtctgacccagctcagcaggatcttctcagagttggtctgctgcaggccagccatgatgttcttcatcacattcttcacttgccagtgcaggatgatgttccagatcaggcccagggtcagcttgtggttgccatccacaatgtctgtgctgccaatattgaccaggtccacattgttgttctgcagcactctcagggccttgttcacattgttcagggcatgcactcttgtgctgcccttctctttaggcagcttctggcctgtcaggccttccagcagatccagcagccttctgccatcctgcaggtcactgaacaggttctcaatgtgctgcttgccaaacttgctgaactgggcattgacccatttggtgaaggttttcttctgcacatcttccctctcatagcaatcttccacctcttcccaccaaagcatggtggcgaattccgcttggcgcctcccgctcctccgggtagctcgtgggccgccgccggccccggagccttttatcgaggcgggcgggagcaccgcccggcccccaggaatgcggccccggccgagggcccgtcgccatatttgggtgtccgtgaggaaccgtcgccatatttgggtgtccaccattcctccgctctaaaaataactccccgctctaaaaataactcccccaacacctgctgcctgcccaccttcctcaccgctctaaaaataactccccaccattcctcacccgtcgccatatttgggtgtcgtgaggatggtgccgagggcggacggcctctagaggatccccattaccctgcatatgaggaacccctagtgatggagttggccactccctctctgcgcgctcgctcgctcactgaggccgggcgaccaaaggtcgcccgacgcccgggctttgcccgggcggcctcagtgagcgagcgagcgcgcagcctaattaaggccttaattaagcataaatccaacagcgtttgtataggctgtcgcccctcctgacgcggtaggaggaggggagggtgccctgcatgtctgccgctgctcttgctcttgccgctgctgaggaggggggcgcatctgccgcagcaccggatgcatctgggaaaagcaaaaaaggggctcgtccctgtttccggaggaatttgcaagcggggtcttgcatgacggggaggcaaacccccgttcgccgcagtccggccggtccgagactcgaaccgggggtcccgcgactcaacccttggaaaataaccctccggctacagggagcgagccacttaatgctttcgctttccagcctaaccgcttacgctgcgcgcggccagtggccaaaaaagctagcgcagcagccgccgcgcctggaaggaagccaaaaggagcactcccccgttgtctgacgtcgcacacctgggttcgacacgcgggcggtaaccgcatggatcacggcggacggccggatacggggctcgaaccccggtcgtccgccatgatacccttgcgaatttatccaccagaccacggaagagtgcccgcttacaggctctccttttgcacggtctagagcgtcaacgattgcgcgcgcctgaccggccagagcgtcccgaccatggagcactttttgccgctgcgcaacatctggaaccgcgtccgcgactttccgcgcgcctccaccaccgccgccggcatcacctggatgtccaggtacatctacggatatggcaaacagctattatgggtattatgggtgcggccgcggatcccgggcccgtcgactgcagaggcctgcatgcaagcttggtgtaatcatggtcatagctgtttcctgtgtgaaattgttatccgctcacaattccacacaacatacgagccggaagcataaagtgtaaagcctggggtgcctaatgagtgagctaactcacattaattgcgttgcgctcactgcccgctttccagtcgggaaacctgtcgtgccagctgcattaatgaatcggccaacgcgcggggagaggcggtttgcgtattgggcgctcttccgcttcctcgctcactgactcgctgcgctcggtcgttcggctgcggcgagcggtatcagctcactcaaaggcggtaatacggttatccacagaatcaggggataacgcaggaaagaacatgtgagcaaaaggccagcaaaaggccaggaaccgtaaaaaggccgcgttgctggcgtttttccataggctccgcccccctgacgagcatcacaaaaatcgacgctcaagtcagaggtggcgaaacccgacaggactataaagataccaggcgtttccccctggaagctccctcgtgcgctctcctgttccgaccctgccgcttaccggatacctgtccgcctttctcccttcgggaagcgtggcgctttctcatagctcacgctgtaggtatctcagttcggtgtaggtcgttcgctccaagctgggctgtgtgcacgaaccccccgttcagcccgaccgctgcgccttatccggtaactatcgtcttgagtccaacccggtaagacacgacttatcgccactggcagcagccactggtaacaggattagcagagcgaggtatgtaggcggtgctacagagttcttgaagtggtggcctaactacggctacactagaagaacagtatttggtatctgcgctctgctgaagccagttaccttcggaaaaagagttggtagctcttgatccggcaaacaaaccaccgctggtagcggtggtttttttgtttgcaagcagcagattacgcgcagaaaaaaaggatctcaagaagatcctttgatcttttctacggggtctgacgctcagtggaacgaaaactcacgttaagggattttggtcatgagattatcaaaaaggatcttcacctagaaggtcctgtattagaggtcacgtgagtgttttgcgacattttgcgacaccatgtggtcacgctgggtatttaagcccgagtgagcacgcagggtctccattttgaagcgggaggtttgaacgcgcagccgccatccttttaaattaaaaatgaagttttaaatcaagcccaatctgaataatgttacaaccaattaaccaattctgattagaaaaactcatcgagcatcaaatgaaactgcaatttattcatatcaggattatcaataccatatttttgaaaaagccgtttctgtaatgaaggagaaaactcaccgaggcagttccataggatggcaagatcctggtatcggtctgcgattccgactcgtccaacatcaatacaacctattaatttcccctcgtcaaaaataaggttatcaagtgagaaatcaccatgagtgacgactgaatccggtgagaatggcaaaagtttatgcatttctttccagacttgttcaacaggccagccattacgctcgtcatcaaaatcactcgcatcaaccaaaccgttattcattcgtgattgcgcctgagcgagacgaaatacgcgatcgctgttaaaaggacaattacaaacaggaatcgaatgcaaccggcgcaggaacactgccagcgcatcaacaatattttcacctgaatcaggatattcttctaatacctggaatgctgtttttccggggatcgcagtggtgagtaaccatgcatcatcaggagtacggataaaatgcttgatggtcggaagaggcataaattccgtcagccagtttagtctgaccatctcatctgtaacatcattggcaacgctacctttgccatgtttcagaaacaactctggcgcatcgggcttcccatacaagcgatagattgtcgcacctgattgcccgacattatcgcgagcccatttatacccatataaatcagcatccatgttggaatttaatcgcggcctcgacgtttcccgttgaatatggctcataacaccccttgtattactgtttatgtaagcagacagttttattgttcatgatgatatatttttatcttgtgcaatgtaacatcagagattttgagacacgggccagagctgca

SEQ ID NO: 106 - DNA, 5505 bp, synthetic construct
  source 1..5505: mol_type = other DNA
tcagaagtcgaaggggttctgtctggcatcggaatgggccacgggcagagacacgttccggtactggtgcttggtggaccacttgaactcaggcacgaccattctaggcagctctgtgaagttctcgctccacaggctccgcaccatcaccagggcgttcagcaggtcaggggcgctgattttgaagtcgcagttaggtccgccgccctgggctctgctgtttctgtacacagggttgcagcactggaacacaataagagcagggtggtgcacgctggccagcacagacttgtcgctgatcaggtcggcgtcgagatcctcggcgttagacaaggcaaaaggggtcagcttgggcagctggcggcccaggaaaggggcgtggccgggcttgctattgcactcgcatctcagaggcatcagcaggtggccgtggccggtctgggcgttggggtacagggcctgcataaaggccttgatctgtttgaaggccacttgggccttggcgccttcggagaagaacatgccgcagcttttgccgctgaactggttggcggggcaggcggcgtcgtgcacacaacaccgggcgtcggtattgctgatctgcaccacgtttctgccccatctgttcttcacgatcttggccttgctgctctgctctttcagggccctctggccgttctcagaggtgacgtccatctcgatcacatgttccttgttgatcatgatgctgccgtgcagacacttcagctcgccctcgatttccgcgcatctgtgcagccacagggcacaaccggtaggctcgtggtgcttgtatgtcacctcagcaaaagattgcaggtaggcttgcaggaatctgcccatcatggtcacgaaggtcttgttggaggtaaaagtcagctgcagtcctctgtgttcctcgttcagccatgtcttgcacacggcggccagagcctcgacctgatctggcagcagcttgaaattagccttcaggtcgttgtccacgtgatacttatccatcagtgctctggcggcttccatgcccttctcccaggcggaaacgatgggcacgctcagggggttcatcacggtgatctcgctttcagcttctgaaggttcctcctcttcctcctgtgttctcatgccccgagccacggggtcgtcctcattcagtctccgcacggttctttttcctccctttccgtgcttaatcagtacaggaggattagagaagcccaccatctggagggcgacgtcctccctttcttcttcgctatccacgatcacttctgggctggggggccgttcaggctttgggctaggccgtttttttttcttcttaggggcgatagccagatcagcggcgcttgtagagggccgaggactaggggttctaggcacgagggcgtcctggctgctgtcctcctcatcctcgctctcgatccgtctccgcattctcttcttagggggggcccgcggagggggagggctagggctaggggacgacacatcttccatggttggaggtctgcgagcagcgcctctgcctctctctggtgttgtctcgcgctgttcttcctctctagaggccatttccttctcctataggcagaaaaagatcgttgaaactcactccggggctgtggacgtcggcttaccttcgcaaatttgtacctgaggactaccacgcccacgagattaggttctacgaagaccaatcccgcccgcctaatgcggagcttaccgcctgcgtcattacccagggccacattcttggccaattgcaagccatcaacaaagcccgccaagagtttctgctacgaaagggacggggggtttacttggacccccagtccggcgaggagctcaacccaatccccccgccgccgcagccctatcagcagcagccgcgggcccttgcttcccaggatggcacccaaaaagaagctgcagctgccgccgccacccacggacgaggaggaatactgggacagtcaggcagaggaggttttggacgaggaggaggaggacatgatggaagactgggagagcctagacgaggaagcttccgaggtcgaagaggtgtcagacgaaacaccgtcaccctcggtcgcattcccctcgccggcgccccagaaatcggcaaccggttccagcatggctacaacctccgctcctcaggcgccgccggcactgcccgttcgccgacccaaccgtagatgggacaccactggaaccagggccggtaagtccaagcagccgccgccgttagcccaagagcaacaacagcgccaaggctaccgctcatggcgcgggcacaagaacgccatagttgcttgcttgcaagactgtgggggcaacatctccttcgcccgccgctttcttctctaccatcacggcgtggccttcccccgtaacatcctgcattactaccgtcatctctacagcccatactgcaccggcggcagcggcagcaacagcagcggccacacagaagcaaaggcgaccggatagcaagactctgacaaagcccaagaaatccacagcggcggcagcagcaggaggaggagcgctgcgtctggcgcccaacgaacccgtatcgacccgcgagcttagaaacaggatttttcccactctgtatgctatatttcaacagagcaggggccaagaacaagagctgaaaataaaaaacaggtctctgcgatccctcacccgcagctgcctgtatcacaaaagcgaagatcagcttcggcgcacgctggaagacgcggaggctctcttcagtaaatactgcgcgctgactcttaaggactagtttcgcgccctttctcaaatttaagcgcgaaaactacgtcatctccagcggccacacccggcgccagcacctgttgtcagcgccattttttagggcggagtaacttgtatgtgttgggaattgtagttttcttaaaatgggaagtgacgtaacgtgggaaaacggaagtgacgatttgaggaagttgtgggttttttggctttcgtttctgggcgtaggttcgcgtgcggttttctgggtgttttttgtggactttaaccgttacgtcattttttagtcctatatatactcgctctgcacttggcccttttttacactgtgactgattgagctggtgccgtgtcgagtggtgtttttttaataggttttcttttttactggtaaggctgactgttatgactacgtccggcgttccatttggcatgacactacgaccaacacgatctcggttgtctcggcgcactccgtacagtagggatcgtctacctccttttgagacagaaacccgcgctaccatactggaggatcatccgctgctgcccgaatgtaacactttgacaatgcacaacgtgagttacgtgcgaggtcttccctgcagtgtgggatttacgctgattcaggaatgggttgttccctgggatatggttctaacgcgggaggagcttgtaatcctgaggaagtgtatgcacgtgtgcctgtgttgtgccaacattgatatcatgacgagcatgatgatccatggttacgagtcctgggctctccactgtcattgttccagtcccggttccctgcagtgtatagccggcgggcaggttttggccagctggtttaggatggtggtggatggcgccatgtttaatcagaggtttatatggtaccgggaggtggtgaattacaacatgccaaaagaggtaatgtttatgtccagcgtgtttatgaggggtcgccacttaatctacctgcgcttgtggtatgatggccacgtgggttctgtggtccccgccatgagctttggatacagcgccttgcactgtgggattttgaacaatattgtggtgctgtgctgcagttactgtgctgatttaagtgagatcagggtgcgctgctgtgcccggaggacaaggcgccttatgctgcgggcggtgcgaatcatcgctgaggagaccactgccatgttgtattcctgcaggacggagcggcggcggcagcagtttattcgcgcgctgctgcagcaccaccgccctatcctgatgcacgattatgactctacccccatgtaggcgtggacttctccttcgccgcccgttaagcaaccgcaagttggacagcagcctgtggctcagcagctggacagcgacatgaacttaagtgagctgcccggggagtttattaatatcactgatgagcgtttggctcgacaggaaaccgtgtggaatataacacctaagaatatgtctgttacccatgatatgatgctttttaaggccagccggggagaaaggactgtgtactctgtgtgttgggagggaggtggcaggttgaatactagggttctgtgagtttgattaaggtacggtgatctgtataagctatgtggtggtggggctatactactgaatgaaaaatgacttgaaattttctgcaattgaaaaataaacacgttgaaacataacacaaacgattctttattcttgggcaatgtatgaaaaagtgtaagaggatgtggcaaatatttcattaatgtagttgtggccagaccagtcccatgaaaatgacatagagtatgcacttggagttgtgtctcctgtttcctgtgtaccgtttagtgtaatggttagtgttacaggtttagttttgtctccgtttaagtaaacttgactgacaatgttacttttggcagttttaccgtgagattttggataagctgataggttaggcataaatccaacagcgtttgtataggctgtcgcccctcctgacgcggtaggaggaggggagggtgccctgcatgtctgccgctgctcttgctcttgccgctgctgaggaggggggcgcatctgccgcagcaccggatgcatctgggaaaagcaaaaaaggggctcgtccctgtttccggaggaatttgcaagcggggtcttgcatgacggggaggcaaacccccgttcgccgcagtccggccggtccgagactcgaaccgggggtcccgcgactcaacccttggaaaataaccctccggctacagggagcgagccacttaatgctttcgctttccagcctaaccgcttacgctgcgcgcggccagtggccaaaaaagctagcgcagcagccgccgcgcctggaaggaagccaaaaggagcactcccccgttgtctgacgtcgcacacctgggttcgacacgcgggcggtaaccgcatggatcacggcggacggccggatacggggctcgaaccccggtcgtccgccatgatacccttgcgaatttatccaccagaccacggaagagtgcccgcttacaggctctccttttgcacggtctagagcgtcaacgattgcgcgcgcctgaccggccagagcgtcccgaccatggagcactttttgccgctgcgcaacatctggaaccgcgtccgcgactttccgcgcgcctccaccaccgccgccggcatcacctggatgtccaggtacatctacggata

SEQ ID NO: 107 - DNA, 5576 bp, synthetic construct
  source 1..5576: mol_type = other DNA
aataaaggcaaatgcttttatttgtacactctcgggtgattatttacccccacccttgccgtctgcgccgttcagaagtcgaaggggttctgtctggcatcggaatgggccacgggcagagacacgttccggtactggtgcttggtggaccacttgaactcaggcacgaccattctaggcagctctgtgaagttctcgctccacaggctccgcaccatcaccagggcgttcagcaggtcaggggcgctgattttgaagtcgcagttaggtccgccgccctgggctctgctgtttctgtacacagggttgcagcactggaacacaataagagcagggtggtgcacgctggccagcacagacttgtcgctgatcaggtcggcgtcgagatcctcggcgttagacaaggcaaaaggggtcagcttgggcagctggcggcccaggaaaggggcgtggccgggcttgctattgcactcgcatctcagaggcatcagcaggtggccgtggccggtctgggcgttggggtacagggcctgcataaaggccttgatctgtttgaaggccacttgggccttggcgccttcggagaagaacatgccgcagcttttgccgctgaactggttggcggggcaggcggcgtcgtgcacacaacaccgggcgtcggtattgctgatctgcaccacgtttctgccccatctgttcttcacgatcttggccttgctgctctgctctttcagggccctctggccgttctcagaggtgacgtccatctcgatcacatgttccttgttgatcatgatgctgccgtgcagacacttcagctcgccctcgatttccgcgcatctgtgcagccacagggcacaaccggtaggctcgtggtgcttgtatgtcacctcagcaaaagattgcaggtaggcttgcaggaatctgcccatcatggtcacgaaggtcttgttggaggtaaaagtcagctgcagtcctctgtgttcctcgttcagccatgtcttgcacacggcggccagagcctcgacctgatctggcagcagcttgaaattagccttcaggtcgttgtccacgtgatacttatccatcagtgctctggcggcttccatgcccttctcccaggcggaaacgatgggcacgctcagggggttcatcacggtgatctcgctttcagcttctgaaggttcctcctcttcctcctgtgttctcatgccccgagccacggggtcgtcctcattcagtctccgcacggttctttttcctccctttccgtgcttaatcagtacaggaggattagagaagcccaccatctggagggcgacgtcctccctttcttcttcgctatccacgatcacttctgggctggggggccgttcaggctttgggctaggccgtttttttttcttcttaggggcgatagccagatcagcggcgcttgtagagggccgaggactaggggttctaggcacgagggcgtcctggctgctgtcctcctcatcctcgctctcgatccgtctccgcattctcttcttagggggggcccgcggagggggagggctagggctaggggacgacacatcttccatggttggaggtctgcgagcagcgcctctgcctctctctggtgttgtctcgcgctgttcttcctctctagaggccatttccttctcctataggcagaaaaagatcgttgaaactcactccggggctgtggacgtcggcttaccttcgcaaatttgtacctgaggactaccacgcccacgagattaggttctacgaagaccaatcccgcccgcctaatgcggagcttaccgcctgcgtcattacccagggccacattcttggccaattgcaagccatcaacaaagcccgccaagagtttctgctacgaaagggacggggggtttacttggacccccagtccggcgaggagctcaacccaatccccccgccgccgcagccctatcagcagcagccgcgggcccttgcttcccaggatggcacccaaaaagaagctgcagctgccgccgccacccacggacgaggaggaatactgggacagtcaggcagaggaggttttggacgaggaggaggaggacatgatggaagactgggagagcctagacgaggaagcttccgaggtcgaagaggtgtcagacgaaacaccgtcaccctcggtcgcattcccctcgccggcgccccagaaatcggcaaccggttccagcatggctacaacctccgctcctcaggcgccgccggcactgcccgttcgccgacccaaccgtagatgggacaccactggaaccagggccggtaagtccaagcagccgccgccgttagcccaagagcaacaacagcgccaaggctaccgctcatggcgcgggcacaagaacgccatagttgcttgcttgcaagactgtgggggcaacatctccttcgcccgccgctttcttctctaccatcacggcgtggccttcccccgtaacatcctgcattactaccgtcatctctacagcccatactgcaccggcggcagcggcagcaacagcagcggccacacagaagcaaaggcgaccggatagcaagactctgacaaagcccaagaaatccacagcggcggcagcagcaggaggaggagcgctgcgtctggcgcccaacgaacccgtatcgacccgcgagcttagaaacaggatttttcccactctgtatgctatatttcaacagagcaggggccaagaacaagagctgaaaataaaaaacaggtctctgcgatccctcacccgcagctgcctgtatcacaaaagcgaagatcagcttcggcgcacgctggaagacgcggaggctctcttcagtaaatactgcgcgctgactcttaaggactagtttcgcgccctttctcaaatttaagcgcgaaaactacgtcatctccagcggccacacccggcgccagcacctgttgtcagcgccattttttagggcggagtaacttgtatgtgttgggaattgtagttttcttaaaatgggaagtgacgtaacgtgggaaaacggaagtgacgatttgaggaagttgtgggttttttggctttcgtttctgggcgtaggttcgcgtgcggttttctgggtgttttttgtggactttaaccgttacgtcattttttagtcctatatatactcgctctgcacttggcccttttttacactgtgactgattgagctggtgccgtgtcgagtggtgtttttttaataggttttcttttttactggtaaggctgactgttatgactacgtccggcgttccatttggcatgacactacgaccaacacgatctcggttgtctcggcgcactccgtacagtagggatcgtctacctccttttgagacagaaacccgcgctaccatactggaggatcatccgctgctgcccgaatgtaacactttgacaatgcacaacgtgagttacgtgcgaggtcttccctgcagtgtgggatttacgctgattcaggaatgggttgttccctgggatatggttctaacgcgggaggagcttgtaatcctgaggaagtgtatgcacgtgtgcctgtgttgtgccaacattgatatcatgacgagcatgatgatccatggttacgagtcctgggctctccactgtcattgttccagtcccggttccctgcagtgtatagccggcgggcaggttttggccagctggtttaggatggtggtggatggcgccatgtttaatcagaggtttatatggtaccgggaggtggtgaattacaacatgccaaaagaggtaatgtttatgtccagcgtgtttatgaggggtcgccacttaatctacctgcgcttgtggtatgatggccacgtgggttctgtggtccccgccatgagctttggatacagcgccttgcactgtgggattttgaacaatattgtggtgctgtgctgcagttactgtgctgatttaagtgagatcagggtgcgctgctgtgcccggaggacaaggcgccttatgctgcgggcggtgcgaatcatcgctgaggagaccactgccatgttgtattcctgcaggacggagcggcggcggcagcagtttattcgcgcgctgctgcagcaccaccgccctatcctgatgcacgattatgactctacccccatgtaggcgtggacttctccttcgccgcccgttaagcaaccgcaagttggacagcagcctgtggctcagcagctggacagcgacatgaacttaagtgagctgcccggggagtttattaatatcactgatgagcgtttggctcgacaggaaaccgtgtggaatataacacctaagaatatgtctgttacccatgatatgatgctttttaaggccagccggggagaaaggactgtgtactctgtgtgttgggagggaggtggcaggttgaatactagggttctgtgagtttgattaaggtacggtgatctgtataagctatgtggtggtggggctatactactgaatgaaaaatgacttgaaattttctgcaattgaaaaataaacacgttgaaacataacacaaacgattctttattcttgggcaatgtatgaaaaagtgtaagaggatgtggcaaatatttcattaatgtagttgtggccagaccagtcccatgaaaatgacatagagtatgcacttggagttgtgtctcctgtttcctgtgtaccgtttagtgtaatggttagtgttacaggtttagttttgtctccgtttaagtaaacttgactgacaatgttacttttggcagttttaccgtgagattttggataagctgataggttaggcataaatccaacagcgtttgtataggctgtcgcccctcctgacgcggtaggaggaggggagggtgccctgcatgtctgccgctgctcttgctcttgccgctgctgaggaggggggcgcatctgccgcagcaccggatgcatctgggaaaagcaaaaaaggggctcgtccctgtttccggaggaatttgcaagcggggtcttgcatgacggggaggcaaacccccgttcgccgcagtccggccggtccgagactcgaaccgggggtcccgcgactcaacccttggaaaataaccctccggctacagggagcgagccacttaatgctttcgctttccagcctaaccgcttacgctgcgcgcggccagtggccaaaaaagctagcgcagcagccgccgcgcctggaaggaagccaaaaggagcactcccccgttgtctgacgtcgcacacctgggttcgacacgcgggcggtaaccgcatggatcacggcggacggccggatacggggctcgaaccccggtcgtccgccatgatacccttgcgaatttatccaccagaccacggaagagtgcccgcttacaggctctccttttgcacggtctagagcgtcaacgattgcgcgcgcctgaccggccagagcgtcccgaccatggagcactttttgccgctgcgcaacatctggaaccgcgtccgcgactttccgcgcgcctccaccaccgccgccggcatcacctggatgtccaggtacatctacggata

SEQ ID NO: 108 - DNA, 5505 bp, synthetic construct
  source 1..5505: mol_type = other DNA
ttaaaaatcaaaggggttctgccgcgcatcgctatgcgccactggcagggacacgttgcgatactggtgtttagtgctccacttaaactcaggcacaaccatccgcggcagctcggtgaagttttcactccacaggctgcgcaccatcaccaacgcgtttagcaggtcgggcgccgatatcttgaagtcgcagttggggcctccgccctgcgcgcgcgagttgcgatacacagggttgcagcactggaacactatcagcgccgggtggtgcacgctggccagcacgctcttgtcggagatcagatccgcgtccaggtcctccgcgttgctcagggcgaacggagtcaactttggtagctgccttcccaaaaagggcgcgtgcccaggctttgagttgcactcgcaccgtagtggcatcaaaaggtgaccgtgcccggtctgggcgttaggatacagcgcctgcataaaagccttgatctgcttaaaagccacctgagcctttgcgccttcagagaagaacatgccgcaagacttgccggaaaactgattggccggacaggccgcgtcgtgcacgcagcaccttgcgtcggtgttggagatctgcaccacatttcggccccaccggttcttcacgatcttggccttgctagactgctccttcagcgcgcgctgcccgttttcgctcgtcacatccatttcaatcacgtgctccttatttatcataatgcttccgtgtagacacttaagctcgccttcgatctcagcgcagcggtgcagccacaacgcgcagcccgtgggctcgtgatgcttgtaggtcacctctgcaaacgactgcaggtacgcctgcaggaatcgccccatcatcgtcacaaaggtcttgttgctggtgaaggtcagctgcaacccgcggtgctcctcgttcagccaggtcttgcatacggccgccagagcttccacttggtcaggcagtagtttgaagttcgcctttagatcgttatccacgtggtacttgtccatcagcgcgcgcgcagcctccatgcccttctcccacgcagacacgatcggcacactcagcgggttcatcaccgtaatttcactttccgcttcgctgggctcttcctcttcctcttgcgtccgcataccacgcgccactgggtcgtcttcattcagccgccgcactgtgcgcttacctcctttgccatgcttgattagcaccggtgggttgctgaaacccaccatttgtagcgccacatcttctctttcttcctcgctgtccacgattacctctggtgatggcgggcgctcgggcttgggagaagggcgcttctttttcttcttgggcgcaatggccaaatccgccgccgaggtcgatggccgcgggctgggtgtgcgcggcaccagcgcgtcttgtgatgagtcttcctcgtcctcggactcgatacgccgcctcatccgcttttttgggggcgcccggggaggcggcggcgacggggacggggacgacacgtcctccatggttgggggacgtcgcgccgcaccgcgtccgcgctcgggggtggtttcgcgctgctcctcttcccgactggccatttccttctcctataggcagaaaaagatcgttgaaactcactccggggctgtggacgtcggcttaccttcgcaaatttgtacctgaggactaccacgcccacgagattaggttctacgaagaccaatcccgcccgcctaatgcggagcttaccgcctgcgtcattacccagggccacattcttggccaattgcaagccatcaacaaagcccgccaagagtttctgctacgaaagggacggggggtttacttggacccccagtccggcgaggagctcaacccaatccccccgccgccgcagccctatcagcagcagccgcgggcccttgcttcccaggatggcacccaaaaagaagctgcagctgccgccgccacccacggacgaggaggaatactgggacagtcaggcagaggaggttttggacgaggaggaggaggacatgatggaagactgggagagcctagacgaggaagcttccgaggtcgaagaggtgtcagacgaaacaccgtcaccctcggtcgcattcccctcgccggcgccccagaaatcggcaaccggttccagcatggctacaacctccgctcctcaggcgccgccggcactgcccgttcgccgacccaaccgtagatgggacaccactggaaccagggccggtaagtccaagcagccgccgccgttagcccaagagcaacaacagcgccaaggctaccgctcatggcgcgggcacaagaacgccatagttgcttgcttgcaagactgtgggggcaacatctccttcgcccgccgctttcttctctaccatcacggcgtggccttcccccgtaacatcctgcattactaccgtcatctctacagcccatactgcaccggcggcagcggcagcaacagcagcggccacacagaagcaaaggcgaccggatagcaagactctgacaaagcccaagaaatccacagcggcggcagcagcaggaggaggagcgctgcgtctggcgcccaacgaacccgtatcgacccgcgagcttagaaacaggatttttcccactctgtatgctatatttcaacagagcaggggccaagaacaagagctgaaaataaaaaacaggtctctgcgatccctcacccgcagctgcctgtatcacaaaagcgaagatcagcttcggcgcacgctggaagacgcggaggctctcttcagtaaatactgcgcgctgactcttaaggactagtttcgcgccctttctcaaatttaagcgcgaaaactacgtcatctccagcggccacacccggcgccagcacctgttgtcagcgccattttttagggcggagtaacttgtatgtgttgggaattgtagttttcttaaaatgggaagtgacgtaacgtgggaaaacggaagtgacgatttgaggaagttgtgggttttttggctttcgtttctgggcgtaggttcgcgtgcggttttctgggtgttttttgtggactttaaccgttacgtcattttttagtcctatatatactcgctctgcacttggcccttttttacactgtgactgattgagctggtgccgtgtcgagtggtgtttttttaataggttttcttttttactggtaaggctgactgttatgacaacctccggcgtgcctttcggcatgaccctgagacctaccagatctcggctgagcagacggaccccttacagccgggacagactgcctccattcgagacagaaacaagagccaccatcctggaagatcaccccctgctgcccgagtgcaacaccctgaccatgcacaacgtgagttacgtgcgaggtcttccctgcagtgtgggatttacgctgattcaggaatgggtcgtgccatgggatatggttctcaccagagaggaactggtgatcctgagaaagtgcatgcacgtgtgcctgtgttgcgccaatatcgacatcatgaccagcatgatgatccacggctacgagagctgggcccttcattgccactgtagcagccctggctctctgcagtgcatcgccggcggccaggtgctggccagctggttcagaatggtggtcgacggcgccatgttcaaccagagattcatctggtatcgcgaggtggtgaactacaacatgcctaaggaagtgatgtttatgtcctctgtgttcatgagaggaagacacctgatctacctgcggctgtggtacgacggacacgtgggcagcgtggtgcccgccatgagcttcggctacagcgccctgcactgcggcatcctgaacaacattgtggtgctgtgctgctcctactgcgctgatctgagcgagatcagagtgcggtgctgtgctagacggacccggagactgatgctgagagccgtgcggatcatcgctgaagagacaacagccatgctgtactcttgtagaaccgagagaaggcggcagcagtttatccgggccctgctgcaacaccacagacctatcctgatgcacgattatgactctacccccatgtaggcgtggacttctccttcgccacctgtgaaacagccccaggtgggccagcaacctgtcgcccagcagctggacagcgacatgaacctgagcgagctgcccggcgagttcatcaacatcacagatgagcggctggctagacaggagacagtgtggaatatcacccctaagaacatgagcgtgacccacgacatgatgctgttcaaggcctctagaggcgaacggaccgtgtactccgtgtgctgggaaggcggcggaagactgaacaccagagtgctgtgagtttgattaaggtacggtgatctgtataagctatgtggtggtggggctatactactgaatgaaaaatgacttgaaattttctgcaattgaaaaataaacacgttgaaacataacacaaacgattctttattcttgggcaatgtatgaaaaagtgtaagaggatgtggcaaatatttcattaatgtagttgtggccagaccagtcccatgaaaatgacatagagtatgcacttggagttgtgtctcctgtttcctgtgtaccgtttagtgtaatggttagtgttacaggtttagttttgtctccgtttaagtaaacttgactgacaatgttacttttggcagttttaccgtgagattttggataagctgataggttaggcataaatccaacagcgtttgtataggctgtcgcccctcctgacgcggtaggaggaggggagggtgccctgcatgtctgccgctgctcttgctcttgccgctgctgaggaggggggcgcatctgccgcagcaccggatgcatctgggaaaagcaaaaaaggggctcgtccctgtttccggaggaatttgcaagcggggtcttgcatgacggggaggcaaacccccgttcgccgcagtccggccggtccgagactcgaaccgggggtcccgcgactcaacccttggaaaataaccctccggctacagggagcgagccacttaatgctttcgctttccagcctaaccgcttacgctgcgcgcggccagtggccaaaaaagctagcgcagcagccgccgcgcctggaaggaagccaaaaggagcactcccccgttgtctgacgtcgcacacctgggttcgacacgcgggcggtaaccgcatggatcacggcggacggccggatacggggctcgaaccccggtcgtccgccatgatacccttgcgaatttatccaccagaccacggaagagtgcccgcttacaggctctccttttgcacggtctagagcgtcaacgattgcgcgcgcctgaccggccagagcgtcccgaccatggagcactttttgccgctgcgcaacatctggaaccgcgtccgcgactttccgcgcgcctccaccaccgccgccggcatcacctggatgtccaggtacatctacggata

SEQ ID NO: 109 - DNA, 5576 bp, synthetic construct
  source 1..5576: mol_type = other DNA
aataaaggcaaatgcttttatttgtacactctcgggtgattatttacccccacccttgccgtctgcgccgtttaaaaatcaaaggggttctgccgcgcatcgctatgcgccactggcagggacacgttgcgatactggtgtttagtgctccacttaaactcaggcacaaccatccgcggcagctcggtgaagttttcactccacaggctgcgcaccatcaccaacgcgtttagcaggtcgggcgccgatatcttgaagtcgcagttggggcctccgccctgcgcgcgcgagttgcgatacacagggttgcagcactggaacactatcagcgccgggtggtgcacgctggccagcacgctcttgtcggagatcagatccgcgtccaggtcctccgcgttgctcagggcgaacggagtcaactttggtagctgccttcccaaaaagggcgcgtgcccaggctttgagttgcactcgcaccgtagtggcatcaaaaggtgaccgtgcccggtctgggcgttaggatacagcgcctgcataaaagccttgatctgcttaaaagccacctgagcctttgcgccttcagagaagaacatgccgcaagacttgccggaaaactgattggccggacaggccgcgtcgtgcacgcagcaccttgcgtcggtgttggagatctgcaccacatttcggccccaccggttcttcacgatcttggccttgctagactgctccttcagcgcgcgctgcccgttttcgctcgtcacatccatttcaatcacgtgctccttatttatcataatgcttccgtgtagacacttaagctcgccttcgatctcagcgcagcggtgcagccacaacgcgcagcccgtgggctcgtgatgcttgtaggtcacctctgcaaacgactgcaggtacgcctgcaggaatcgccccatcatcgtcacaaaggtcttgttgctggtgaaggtcagctgcaacccgcggtgctcctcgttcagccaggtcttgcatacggccgccagagcttccacttggtcaggcagtagtttgaagttcgcctttagatcgttatccacgtggtacttgtccatcagcgcgcgcgcagcctccatgcccttctcccacgcagacacgatcggcacactcagcgggttcatcaccgtaatttcactttccgcttcgctgggctcttcctcttcctcttgcgtccgcataccacgcgccactgggtcgtcttcattcagccgccgcactgtgcgcttacctcctttgccatgcttgattagcaccggtgggttgctgaaacccaccatttgtagcgccacatcttctctttcttcctcgctgtccacgattacctctggtgatggcgggcgctcgggcttgggagaagggcgcttctttttcttcttgggcgcaatggccaaatccgccgccgaggtcgatggccgcgggctgggtgtgcgcggcaccagcgcgtcttgtgatgagtcttcctcgtcctcggactcgatacgccgcctcatccgcttttttgggggcgcccggggaggcggcggcgacggggacggggacgacacgtcctccatggttgggggacgtcgcgccgcaccgcgtccgcgctcgggggtggtttcgcgctgctcctcttcccgactggccatttccttctcctataggcagaaaaagatcgttgaaactcactccggggctgtggacgtcggcttaccttcgcaaatttgtacctgaggactaccacgcccacgagattaggttctacgaagaccaatcccgcccgcctaatgcggagcttaccgcctgcgtcattacccagggccacattcttggccaattgcaagccatcaacaaagcccgccaagagtttctgctacgaaagggacggggggtttacttggacccccagtccggcgaggagctcaacccaatccccccgccgccgcagccctatcagcagcagccgcgggcccttgcttcccaggatggcacccaaaaagaagctgcagctgccgccgccacccacggacgaggaggaatactgggacagtcaggcagaggaggttttggacgaggaggaggaggacatgatggaagactgggagagcctagacgaggaagcttccgaggtcgaagaggtgtcagacgaaacaccgtcaccctcggtcgcattcccctcgccggcgccccagaaatcggcaaccggttccagcatggctacaacctccgctcctcaggcgccgccggcactgcccgttcgccgacccaaccgtagatgggacaccactggaaccagggccggtaagtccaagcagccgccgccgttagcccaagagcaacaacagcgccaaggctaccgctcatggcgcgggcacaagaacgccatagttgcttgcttgcaagactgtgggggcaacatctccttcgcccgccgctttcttctctaccatcacggcgtggccttcccccgtaacatcctgcattactaccgtcatctctacagcccatactgcaccggcggcagcggcagcaacagcagcggccacacagaagcaaaggcgaccggatagcaagactctgacaaagcccaagaaatccacagcggcggcagcagcaggaggaggagcgctgcgtctggcgcccaacgaacccgtatcgacccgcgagcttagaaacaggatttttcccactctgtatgctatatttcaacagagcaggggccaagaacaagagctgaaaataaaaaacaggtctctgcgatccctcacccgcagctgcctgtatcacaaaagcgaagatcagcttcggcgcacgctggaagacgcggaggctctcttcagtaaatactgcgcgctgactcttaaggactagtttcgcgccctttctcaaatttaagcgcgaaaactacgtcatctccagcggccacacccggcgccagcacctgttgtcagcgccattttttagggcggagtaacttgtatgtgttgggaattgtagttttcttaaaatgggaagtgacgtaacgtgggaaaacggaagtgacgatttgaggaagttgtgggttttttggctttcgtttctgggcgtaggttcgcgtgcggttttctgggtgttttttgtggactttaaccgttacgtcattttttagtcctatatatactcgctctgcacttggcccttttttacactgtgactgattgagctggtgccgtgtcgagtggtgtttttttaataggttttcttttttactggtaaggctgactgttatgacaacctccggcgtgcctttcggcatgaccctgagacctaccagatctcggctgagcagacggaccccttacagccgggacagactgcctccattcgagacagaaacaagagccaccatcctggaagatcaccccctgctgcccgagtgcaacaccctgaccatgcacaacgtgagttacgtgcgaggtcttccctgcagtgtgggatttacgctgattcaggaatgggtcgtgccatgggatatggttctcaccagagaggaactggtgatcctgagaaagtgcatgcacgtgtgcctgtgttgcgccaatatcgacatcatgaccagcatgatgatccacggctacgagagctgggcccttcattgccactgtagcagccctggctctctgcagtgcatcgccggcggccaggtgctggccagctggttcagaatggtggtcgacggcgccatgttcaaccagagattcatctggtatcgcgaggtggtgaactacaacatgcctaaggaagtgatgtttatgtcctctgtgttcatgagaggaagacacctgatctacctgcggctgtggtacgacggacacgtgggcagcgtggtgcccgccatgagcttcggctacagcgccctgcactgcggcatcctgaacaacattgtggtgctgtgctgctcctactgcgctgatctgagcgagatcagagtgcggtgctgtgctagacggacccggagactgatgctgagagccgtgcggatcatcgctgaagagacaacagccatgctgtactcttgtagaaccgagagaaggcggcagcagtttatccgggccctgctgcaacaccacagacctatcctgatgcacgattatgactctacccccatgtaggcgtggacttctccttcgccacctgtgaaacagccccaggtgggccagcaacctgtcgcccagcagctggacagcgacatgaacctgagcgagctgcccggcgagttcatcaacatcacagatgagcggctggctagacaggagacagtgtggaatatcacccctaagaacatgagcgtgacccacgacatgatgctgttcaaggcctctagaggcgaacggaccgtgtactccgtgtgctgggaaggcggcggaagactgaacaccagagtgctgtgagtttgattaaggtacggtgatctgtataagctatgtggtggtggggctatactactgaatgaaaaatgacttgaaattttctgcaattgaaaaataaacacgttgaaacataacacaaacgattctttattcttgggcaatgtatgaaaaagtgtaagaggatgtggcaaatatttcattaatgtagttgtggccagaccagtcccatgaaaatgacatagagtatgcacttggagttgtgtctcctgtttcctgtgtaccgtttagtgtaatggttagtgttacaggtttagttttgtctccgtttaagtaaacttgactgacaatgttacttttggcagttttaccgtgagattttggataagctgataggttaggcataaatccaacagcgtttgtataggctgtcgcccctcctgacgcggtaggaggaggggagggtgccctgcatgtctgccgctgctcttgctcttgccgctgctgaggaggggggcgcatctgccgcagcaccggatgcatctgggaaaagcaaaaaaggggctcgtccctgtttccggaggaatttgcaagcggggtcttgcatgacggggaggcaaacccccgttcgccgcagtccggccggtccgagactcgaaccgggggtcccgcgactcaacccttggaaaataaccctccggctacagggagcgagccacttaatgctttcgctttccagcctaaccgcttacgctgcgcgcggccagtggccaaaaaagctagcgcagcagccgccgcgcctggaaggaagccaaaaggagcactcccccgttgtctgacgtcgcacacctgggttcgacacgcgggcggtaaccgcatggatcacggcggacggccggatacggggctcgaaccccggtcgtccgccatgatacccttgcgaatttatccaccagaccacggaagagtgcccgcttacaggctctccttttgcacggtctagagcgtcaacgattgcgcgcgcctgaccggccagagcgtcccgaccatggagcactttttgccgctgcgcaacatctggaaccgcgtccgcgactttccgcgcgcctccaccaccgccgccggcatcacctggatgtccaggtacatctacggata

SEQ ID NO: 110 - DNA, 6197 bp, synthetic construct
  source 1..6197: mol_type = other DNA
ttaaaaatcaaaggggttctgccgcgcatcgctatgcgccactggcagggacacgttgcgatactggtgtttagtgctccacttaaactcaggcacaaccatccgcggcagctcggtgaagttttcactccacaggctgcgcaccatcaccaacgcgtttagcaggtcgggcgccgatatcttgaagtcgcagttggggcctccgccctgcgcgcgcgagttgcgatacacagggttgcagcactggaacactatcagcgccgggtggtgcacgctggccagcacgctcttgtcggagatcagatccgcgtccaggtcctccgcgttgctcagggcgaacggagtcaactttggtagctgccttcccaaaaagggcgcgtgcccaggctttgagttgcactcgcaccgtagtggcatcaaaaggtgaccgtgcccggtctgggcgttaggatacagcgcctgcataaaagccttgatctgcttaaaagccacctgagcctttgcgccttcagagaagaacatgccgcaagacttgccggaaaactgattggccggacaggccgcgtcgtgcacgcagcaccttgcgtcggtgttggagatctgcaccacatttcggccccaccggttcttcacgatcttggccttgctagactgctccttcagcgcgcgctgcccgttttcgctcgtcacatccatttcaatcacgtgctccttatttatcataatgcttccgtgtagacacttaagctcgccttcgatctcagcgcagcggtgcagccacaacgcgcagcccgtgggctcgtgatgcttgtaggtcacctctgcaaacgactgcaggtacgcctgcaggaatcgccccatcatcgtcacaaaggtcttgttgctggtgaaggtcagctgcaacccgcggtgctcctcgttcagccaggtcttgcatacggccgccagagcttccacttggtcaggcagtagtttgaagttcgcctttagatcgttatccacgtggtacttgtccatcagcgcgcgcgcagcctccatgcccttctcccacgcagacacgatcggcacactcagcgggttcatcaccgtaatttcactttccgcttcgctgggctcttcctcttcctcttgcgtccgcataccacgcgccactgggtcgtcttcattcagccgccgcactgtgcgcttacctcctttgccatgcttgattagcaccggtgggttgctgaaacccaccatttgtagcgccacatcttctctttcttcctcgctgtccacgattacctctggtgatggcgggcgctcgggcttgggagaagggcgcttctttttcttcttgggcgcaatggccaaatccgccgccgaggtcgatggccgcgggctgggtgtgcgcggcaccagcgcgtcttgtgatgagtcttcctcgtcctcggactcgatacgccgcctcatccgcttttttgggggcgcccggggaggcggcggcgacggggacggggacgacacgtcctccatggttgggggacgtcgcgccgcaccgcgtccgcgctcgggggtggtttcgcgctgctcctcttcccgactggccatttccttctcctataggcagaaaaagatcatggagtcagtcgagaagaaggacagcctaaccgccccctctgagttcgccaccaccgcctccaccgatgccgccaacgcgcctaccaccttccccgtcgaggcacccccgcttgaggaggaggaagtgattatcgagcaggacccaggttttgtaagcgaagacgacgaggaccgctcagtaccaacagaggataaaaagcaagaccaggacaacgcagaggcaaacgaggaacaagtcgggcggggggacgaaaggcatggcgactacctagatgtgggagacgacgtgctgttgaagcatctgcagcgccagtgcgccattatctgcgacgcgttgcaagagcgcagcgatgtgcccctcgccatagcggatgtcagccttgcctacgaacgccacctattctcaccgcgcgtaccccccaaacgccaagaaaacggcacatgcgagcccaacccgcgcctcaacttctaccccgtatttgccgtgccagaggtgcttgccacctatcacatctttttccaaaactgcaagatacccctatcctgccgtgccaaccgcagccgagcggacaagcagctggccttgcggcagggcgctgtcatacctgatatcgcctcgctcaacgaagtgccaaaaatctttgagggtcttggacgcgacgagaagcgcgcggcaaacgctctgcaacaggaaaacagcgaaaatgaaagtcactctggagtgttggtggaactcgagggtgacaacgcgcgcctagccgtactaaaacgcagcatcgaggtcacccactttgcctacccggcacttaacctaccccccaaggtcatgagcacagtcatgagtgagctgatcgtgcgccgtgcgcagcccctggagagggatgcaaatttgcaagaacaaacagaggagggcctacccgcagttggcgacgagcagctagcgcgctggcttcaaacgcgcgagcctgccgacttggaggagcgacgcaaactaatgatggccgcagtgctcgttaccgtggagcttgagtgcatgcagcggttctttgctgacccggagatgcagcgcaagctagaggaaacattgcactacacctttcgacagggctacgtacgccaggcctgcaagatctccaacgtggagctctgcaacctggtctcctaccttggaattttgcacgaaaaccgccttgggcaaaacgtgcttcattccacgctcaagggcgaggcgcgccgcgactacgtccgcgactgcgtttacttatttctatgctacacctggcagacggccatgggcgtttggcagcagtgcttggaggagtgcaacctcaaggagctgcagaaactgctaaagcaaaacttgaaggacctatggacggccttcaacgagcgctccgtggccgcgcacctggcggacatcattttccccgaacgcctgcttaaaaccctgcaacagggtctgccagacttcaccagtcaaagcatgttgcagaactttaggaactttatcctagagcgctcaggaatcttgcccgccacctgctgtgcacttcctagcgactttgtgcccattaagtaccgcgaatgccctccgccgctttggggccactgctaccttctgcagctagccaactaccttgcctaccactctgacataatggaagacgtgagcggtgacggtctactggagtgtcactgtcgctgcaacctatgcaccccgcaccgctccctggtttgcaattcgcagctgcttaacgaaagtcaaattatcggtacctttgagctgcagggtccctcgcctgacgaaaagtccgcggctccggggttgaaactcactccggggctgtggacgtcggcttaccttcgcaaatttgtacctgaggactaccacgcccacgagattaggttctacgaagaccaatcccgcccgcctaatgcggagcttaccgcctgcgtcattacccagggccacattcttggccaattgcaagccatcaacaaagcccgccaagagtttctgctacgaaagggacggggggtttacttggacccccagtccggcgaggagctcaacccaatccccccgccgccgcagccctatcagcagcagccgcgggcccttgcttcccaggatggcacccaaaaagaagctgcagctgccgccgccacccacggacgaggaggaatactgggacagtcaggcagaggaggttttggacgaggaggaggaggacatgatggaagactgggagagcctagacgaggaagcttccgaggtcgaagaggtgtcagacgaaacaccgtcaccctcggtcgcattcccctcgccggcgccccagaaatcggcaaccggttccagcatggctacaacctccgctcctcaggcgccgccggcactgcccgttcgccgacccaaccgtagatgggacaccactggaaccagggccggtaagtccaagcagccgccgccgttagcccaagagcaacaacagcgccaaggctaccgctcatggcgcgggcacaagaacgccatagttgcttgcttgcaagactgtgggggcaacatctccttcgcccgccgctttcttctctaccatcacggcgtggccttcccccgtaacatcctgcattactaccgtcatctctacagcccatactgcaccggcggcagcggcagcaacagcagcggccacacagaagcaaaggcgaccggatagcaagactctgacaaagcccaagaaatccacagcggcggcagcagcaggaggaggagcgctgcgtctggcgcccaacgaacccgtatcgacccgcgagcttagaaacaggatttttcccactctgtatgctatatttcaacagagcaggggccaagaacaagagctgaaaataaaaaacaggtctctgcgatccctcacccgcagctgcctgtatcacaaaagcgaagatcagcttcggcgcacgctggaagacgcggaggctctcttcagtaaatactgcgcgctgactcttaaggactagtttcgcgccctttctcaaatttaagcgcgaaaactacgtcatctccagcggccacacccggcgccagcacctgttgtcagcgccattttttagggcggagtaacttgtatgtgttgggaattgtagttttcttaaaatgggaagtgacgtaacgtgggaaaacggaagtgacgatttgaggaagttgtgggttttttggctttcgtttctgggcgtaggttcgcgtgcggttttctgggtgttttttgtggactttaaccgttacgtcattttttagtcctatatatactcgctctgcacttggcccttttttacactgtgactgattgagctggtgccgtgtcgagtggtgtttttttaataggttttcttttttactggtaaggctgactgttatgactacgtccggcgttccatttggcatgacactacgaccaacacgatctcggttgtctcggcgcactccgtacagtagggatcgtctacctccttttgagacagaaacccgcgctaccatactggaggatcatccgctgctgcccgaatgtaacactttgacaatgcacaacgtgagttacgtgcgaggtcttccctgcagtgtgggatttacgctgattcaggaatgggttgttccctgggatatggttctaacgcgggaggagcttgtaatcctgaggaagtgtatgcacgtgtgcctgtgttgtgccaacattgatatcatgacgagcatgatgatccatggttacgagtcctgggctctccactgtcattgttccagtcccggttccctgcagtgtatagccggcgggcaggttttggccagctggtttaggatggtggtggatggcgccatgtttaatcagaggtttatatggtaccgggaggtggtgaattacaacatgccaaaagaggtaatgtttatgtccagcgtgtttatgaggggtcgccacttaatctacctgcgcttgtggtatgatggccacgtgggttctgtggtccccgccatgagctttggatacagcgccttgcactgtgggattttgaacaatattgtggtgctgtgctgcagttactgtgctgatttaagtgagatcagggtgcgctgctgtgcccggaggacaaggcgccttatgctgcgggcggtgcgaatcatcgctgaggagaccactgccatgttgtattcctgcaggacggagcggcggcggcagcagtttattcgcgcgctgctgcagcaccaccgccctatcctgatgcacgattatgactctacccccatgtaggcgtggacttctccttcgccgcccgttaagcaaccgcaagttggacagcagcctgtggctcagcagctggacagcgacatgaacttaagtgagctgcccggggagtttattaatatcactgatgagcgtttggctcgacaggaaaccgtgtggaatataacacctaagaatatgtctgttacccatgatatgatgctttttaaggccagccggggagaaaggactgtgtactctgtgtgttgggagggaggtggcaggttgaatactagggttctgtga

SEQ ID NO: 111 - DNA, 4371 bp, synthetic construct
  source 1..4371: mol_type = other DNA
ttaaaaatcaaaggggttctgccgcgcatcgctatgcgccactggcagggacacgttgcgatactggtgtttagtgctccacttaaactcaggcacaaccatccgcggcagctcggtgaagttttcactccacaggctgcgcaccatcaccaacgcgtttagcaggtcgggcgccgatatcttgaagtcgcagttggggcctccgccctgcgcgcgcgagttgcgatacacagggttgcagcactggaacactatcagcgccgggtggtgcacgctggccagcacgctcttgtcggagatcagatccgcgtccaggtcctccgcgttgctcagggcgaacggagtcaactttggtagctgccttcccaaaaagggcgcgtgcccaggctttgagttgcactcgcaccgtagtggcatcaaaaggtgaccgtgcccggtctgggcgttaggatacagcgcctgcataaaagccttgatctgcttaaaagccacctgagcctttgcgccttcagagaagaacatgccgcaagacttgccggaaaactgattggccggacaggccgcgtcgtgcacgcagcaccttgcgtcggtgttggagatctgcaccacatttcggccccaccggttcttcacgatcttggccttgctagactgctccttcagcgcgcgctgcccgttttcgctcgtcacatccatttcaatcacgtgctccttatttatcataatgcttccgtgtagacacttaagctcgccttcgatctcagcgcagcggtgcagccacaacgcgcagcccgtgggctcgtgatgcttgtaggtcacctctgcaaacgactgcaggtacgcctgcaggaatcgccccatcatcgtcacaaaggtcttgttgctggtgaaggtcagctgcaacccgcggtgctcctcgttcagccaggtcttgcatacggccgccagagcttccacttggtcaggcagtagtttgaagttcgcctttagatcgttatccacgtggtacttgtccatcagcgcgcgcgcagcctccatgcccttctcccacgcagacacgatcggcacactcagcgggttcatcaccgtaatttcactttccgcttcgctgggctcttcctcttcctcttgcgtccgcataccacgcgccactgggtcgtcttcattcagccgccgcactgtgcgcttacctcctttgccatgcttgattagcaccggtgggttgctgaaacccaccatttgtagcgccacatcttctctttcttcctcgctgtccacgattacctctggtgatggcgggcgctcgggcttgggagaagggcgcttctttttcttcttgggcgcaatggccaaatccgccgccgaggtcgatggccgcgggctgggtgtgcgcggcaccagcgcgtcttgtgatgagtcttcctcgtcctcggactcgatacgccgcctcatccgcttttttgggggcgcccggggaggcggcggcgacggggacggggacgacacgtcctccatggttgggggacgtcgcgccgcaccgcgtccgcgctcgggggtggtttcgcgctgctcctcttcccgactggccatttccttctcctataggcagaaaaagatcgttgaaactcactccggggctgtggacgtcggcttaccttcgcaaatttgtacctgaggactaccacgcccacgagattaggttctacgaagaccaatcccgcccgcctaatgcggagcttaccgcctgcgtcattacccagggccacattcttggccaattgcaagccatcaacaaagcccgccaagagtttctgctacgaaagggacggggggtttacttggacccccagtccggcgaggagctcaacccaatccccccgccgccgcagccctatcagcagcagccgcgggcccttgcttcccaggatggcacccaaaaagaagctgcagctgccgccgccacccacggacgaggaggaatactgggacagtcaggcagaggaggttttggacgaggaggaggaggacatgatggaagactgggagagcctagacgaggaagcttccgaggtcgaagaggtgtcagacgaaacaccgtcaccctcggtcgcattcccctcgccggcgccccagaaatcggcaaccggttccagcatggctacaacctccgctcctcaggcgccgccggcactgcccgttcgccgacccaaccgtagatgggacaccactggaaccagggccggtaagtccaagcagccgccgccgttagcccaagagcaacaacagcgccaaggctaccgctcatggcgcgggcacaagaacgccatagttgcttgcttgcaagactgtgggggcaacatctccttcgcccgccgctttcttctctaccatcacggcgtggccttcccccgtaacatcctgcattactaccgtcatctctacagcccatactgcaccggcggcagcggcagcaacagcagcggccacacagaagcaaaggcgaccggatagcaagactctgacaaagcccaagaaatccacagcggcggcagcagcaggaggaggagcgctgcgtctggcgcccaacgaacccgtatcgacccgcgagcttagaaacaggatttttcccactctgtatgctatatttcaacagagcaggggccaagaacaagagctgaaaataaaaaacaggtctctgcgatccctcacccgcagctgcctgtatcacaaaagcgaagatcagcttcggcgcacgctggaagacgcggaggctctcttcagtaaatactgcgcgctgactcttaaggactagtttcgcgccctttctcaaatttaagcgcgaaaactacgtcatctccagcggccacacccggcgccagcacctgttgtcagcgccattttttagggcggagtaacttgtatgtgttgggaattgtagttttcttaaaatgggaagtgacgtaacgtgggaaaacggaagtgacgatttgaggaagttgtgggttttttggctttcgtttctgggcgtaggttcgcgtgcggttttctgggtgttttttgtggactttaaccgttacgtcattttttagtcctatatatactcgctctgcacttggcccttttttacactgtgactgattgagctggtgccgtgtcgagtggtgtttttttaataggttttcttttttactggtaaggctgactgttatgactacgtccggcgttccatttggcatgacactacgaccaacacgatctcggttgtctcggcgcactccgtacagtagggatcgtctacctccttttgagacagaaacccgcgctaccatactggaggatcatccgctgctgcccgaatgtaacactttgacaatgcacaacgtgagttacgtgcgaggtcttccctgcagtgtgggatttacgctgattcaggaatgggttgttccctgggatatggttctaacgcgggaggagcttgtaatcctgaggaagtgtatgcacgtgtgcctgtgttgtgccaacattgatatcatgacgagcatgatgatccatggttacgagtcctgggctctccactgtcattgttccagtcccggttccctgcagtgtatagccggcgggcaggttttggccagctggtttaggatggtggtggatggcgccatgtttaatcagaggtttatatggtaccgggaggtggtgaattacaacatgccaaaagaggtaatgtttatgtccagcgtgtttatgaggggtcgccacttaatctacctgcgcttgtggtatgatggccacgtgggttctgtggtccccgccatgagctttggatacagcgccttgcactgtgggattttgaacaatattgtggtgctgtgctgcagttactgtgctgatttaagtgagatcagggtgcgctgctgtgcccggaggacaaggcgccttatgctgcgggcggtgcgaatcatcgctgaggagaccactgccatgttgtattcctgcaggacggagcggcggcggcagcagtttattcgcgcgctgctgcagcaccaccgccctatcctgatgcacgattatgactctacccccatgtaggcgtggacttctccttcgccgcccgttaagcaaccgcaagttggacagcagcctgtggctcagcagctggacagcgacatgaacttaagtgagctgcccggggagtttattaatatcactgatgagcgtttggctcgacaggaaaccgtgtggaatataacacctaagaatatgtctgttacccatgatatgatgctttttaaggccagccggggagaaaggactgtgtactctgtgtgttgggagggaggtggcaggttgaatactagggttctgtga

SEQ ID NO: 112 - DNA, 4371 bp, synthetic construct
  source 1..4371: mol_type = other DNA
ttaaaaatcaaaggggttctgccgcgcatcgctatgcgccactggcagggacacgttgcgatactggtgtttagtgctccacttaaactcaggcacaaccatccgcggcagctcggtgaagttttcactccacaggctgcgcaccatcaccaacgcgtttagcaggtcgggcgccgatatcttgaagtcgcagttggggcctccgccctgcgcgcgcgagttgcgatacacagggttgcagcactggaacactatcagcgccgggtggtgcacgctggccagcacgctcttgtcggagatcagatccgcgtccaggtcctccgcgttgctcagggcgaacggagtcaactttggtagctgccttcccaaaaagggcgcgtgcccaggctttgagttgcactcgcaccgtagtggcatcaaaaggtgaccgtgcccggtctgggcgttaggatacagcgcctgcataaaagccttgatctgcttaaaagccacctgagcctttgcgccttcagagaagaacatgccgcaagacttgccggaaaactgattggccggacaggccgcgtcgtgcacgcagcaccttgcgtcggtgttggagatctgcaccacatttcggccccaccggttcttcacgatcttggccttgctagactgctccttcagcgcgcgctgcccgttttcgctcgtcacatccatttcaatcacgtgctccttatttatcataatgcttccgtgtagacacttaagctcgccttcgatctcagcgcagcggtgcagccacaacgcgcagcccgtgggctcgtgatgcttgtaggtcacctctgcaaacgactgcaggtacgcctgcaggaatcgccccatcatcgtcacaaaggtcttgttgctggtgaaggtcagctgcaacccgcggtgctcctcgttcagccaggtcttgcatacggccgccagagcttccacttggtcaggcagtagtttgaagttcgcctttagatcgttatccacgtggtacttgtccatcagcgcgcgcgcagcctccatgcccttctcccacgcagacacgatcggcacactcagcgggttcatcaccgtaatttcactttccgcttcgctgggctcttcctcttcctcttgcgtccgcataccacgcgccactgggtcgtcttcattcagccgccgcactgtgcgcttacctcctttgccatgcttgattagcaccggtgggttgctgaaacccaccatttgtagcgccacatcttctctttcttcctcgctgtccacgattacctctggtgatggcgggcgctcgggcttgggagaagggcgcttctttttcttcttgggcgcaatggccaaatccgccgccgaggtcgatggccgcgggctgggtgtgcgcggcaccagcgcgtcttgtgatgagtcttcctcgtcctcggactcgatacgccgcctcatccgcttttttgggggcgcccggggaggcggcggcgacggggacggggacgacacgtcctccatggttgggggacgtcgcgccgcaccgcgtccgcgctcgggggtggtttcgcgctgctcctcttcccgactggccatttccttctcctataggcagaaaaagatcgttgaaactcactccggggctgtggacgtcggcttaccttcgcaaatttgtacctgaggactaccacgcccacgagattaggttctacgaagaccaatcccgcccgcctaatgcggagcttaccgcctgcgtcattacccagggccacattcttggccaattgcaagccatcaacaaagcccgccaagagtttctgctacgaaagggacggggggtttacttggacccccagtccggcgaggagctcaacccaatccccccgccgccgcagccctatcagcagcagccgcgggcccttgcttcccaggtgatgacccaaaaagaagctgcagctgccgccgccacccacggacgaggaggaatactgggacagtcaggcagaggaggttttggacgaggaggaggaggacatgatggaagactgggagagcctagacgaggaagcttccgaggtcgaagaggtgtcagacgaaacaccgtcaccctcggtcgcattcccctcgccggcgccccagaaatcggcaaccggttccagcatggctacaacctccgctcctcaggcgccgccggcactgcccgttcgccgacccaaccgtagatgggacaccactggaaccagggccggtaagtccaagcagccgccgccgttagcccaagagcaacaacagcgccaaggctaccgctcatggcgcgggcacaagaacgccatagttgcttgcttgcaagactgtgggggcaacatctccttcgcccgccgctttcttctctaccatcacggcgtggccttcccccgtaacatcctgcattactaccgtcatctctacagcccatactgcaccggcggcagcggcagcaacagcagcggccacacagaagcaaaggcgaccggatagcaagactctgacaaagcccaagaaatccacagcggcggcagcagcaggaggaggagcgctgcgtctggcgcccaacgaacccgtatcgacccgcgagcttagaaacaggatttttcccactctgtatgctatatttcaacagagcaggggccaagaacaagagctgaaaataaaaaacaggtctctgcgatccctcacccgcagctgcctgtatcacaaaagcgaagatcagcttcggcgcacgctggaagacgcggaggctctcttcagtaaatactgcgcgctgactcttaaggactagtttcgcgccctttctcaaatttaagcgcgaaaactacgtcatctccagcggccacacccggcgccagcacctgttgtcagcgccattttttagggcggagtaacttgtatgtgttgggaattgtagttttcttaaaatgggaagtgacgtaacgtgggaaaacggaagtgacgatttgaggaagttgtgggttttttggctttcgtttctgggcgtaggttcgcgtgcggttttctgggtgttttttgtggactttaaccgttacgtcattttttagtcctatatatactcgctctgcacttggcccttttttacactgtgactgattgagctggtgccgtgtcgagtggtgtttttttaataggttttcttttttactggtaaggctgactgttatgactacgtccggcgttccatttggcatgacactacgaccaacacgatctcggttgtctcggcgcactccgtacagtagggatcgtctacctccttttgagacagaaacccgcgctaccatactggaggatcatccgctgctgcccgaatgtaacactttgacaatgcacaacgtgagttacgtgcgaggtcttccctgcagtgtgggatttacgctgattcaggaatgggttgttccctgggatatggttctaacgcgggaggagcttgtaatcctgaggaagtgtatgcacgtgtgcctgtgttgtgccaacattgatatcatgacgagcatgatgatccatggttacgagtcctgggctctccactgtcattgttccagtcccggttccctgcagtgtatagccggcgggcaggttttggccagctggtttaggatggtggtggatggcgccatgtttaatcagaggtttatatggtaccgggaggtggtgaattacaacatgccaaaagaggtaatgtttatgtccagcgtgtttatgaggggtcgccacttaatctacctgcgcttgtggtatgatggccacgtgggttctgtggtccccgccatgagctttggatacagcgccttgcactgtgggattttgaacaatattgtggtgctgtgctgcagttactgtgctgatttaagtgagatcagggtgcgctgctgtgcccggaggacaaggcgccttatgctgcgggcggtgcgaatcatcgctgaggagaccactgccatgttgtattcctgcaggacggagcggcggcggcagcagtttattcgcgcgctgctgcagcaccaccgccctatcctgatgcacgattatgactctacccccatgtaggcgtggacttctccttcgccgcccgttaagcaaccgcaagttggacagcagcctgtggctcagcagctggacagcgacatgaacttaagtgagctgcccggggagtttattaatatcactgatgagcgtttggctcgacaggaaaccgtgtggaatataacacctaagaatatgtctgttacccatgatatgatgctttttaaggccagccggggagaaaggactgtgtactctgtgtgttgggagggaggtggcaggttgaatactagggttctgtga

SEQ ID NO: 113 - DNA, 6197 bp, synthetic construct
  source 1..6197: mol_type = other DNA
ttaaaaatcaaaggggttctgccgcgcatcgctatgcgccactggcagggacacgttgcgatactggtgtttagtgctccacttaaactcaggcacaaccatccgcggcagctcggtgaagttttcactccacaggctgcgcaccatcaccaacgcgtttagcaggtcgggcgccgatatcttgaagtcgcagttggggcctccgccctgcgcgcgcgagttgcgatacacagggttgcagcactggaacactatcagcgccgggtggtgcacgctggccagcacgctcttgtcggagatcagatccgcgtccaggtcctccgcgttgctcagggcgaacggagtcaactttggtagctgccttcccaaaaagggcgcgtgcccaggctttgagttgcactcgcaccgtagtggcatcaaaaggtgaccgtgcccggtctgggcgttaggatacagcgcctgcataaaagccttgatctgcttaaaagccacctgagcctttgcgccttcagagaagaacatgccgcaagacttgccggaaaactgattggccggacaggccgcgtcgtgcacgcagcaccttgcgtcggtgttggagatctgcaccacatttcggccccaccggttcttcacgatcttggccttgctagactgctccttcagcgcgcgctgcccgttttcgctcgtcacatccatttcaatcacgtgctccttatttatcataatgcttccgtgtagacacttaagctcgccttcgatctcagcgcagcggtgcagccacaacgcgcagcccgtgggctcgtgatgcttgtaggtcacctctgcaaacgactgcaggtacgcctgcaggaatcgccccatcatcgtcacaaaggtcttgttgctggtgaaggtcagctgcaacccgcggtgctcctcgttcagccaggtcttgcatacggccgccagagcttccacttggtcaggcagtagtttgaagttcgcctttagatcgttatccacgtggtacttgtccatcagcgcgcgcgcagcctccatgcccttctcccacgcagacacgatcggcacactcagcgggttcatcaccgtaatttcactttccgcttcgctgggctcttcctcttcctcttgcgtccgcataccacgcgccactgggtcgtcttcattcagccgccgcactgtgcgcttacctcctttgccatgcttgattagcaccggtgggttgctgaaacccaccatttgtagcgccacatcttctctttcttcctcgctgtccacgattacctctggtgatggcgggcgctcgggcttgggagaagggcgcttctttttcttcttgggcgcaatggccaaatccgccgccgaggtcgatggccgcgggctgggtgtgcgcggcaccagcgcgtcttgtgatgagtcttcctcgtcctcggactcgatacgccgcctcatccgcttttttgggggcgcccggggaggcggcggcgacggggacggggacgacacgtcctccatggttgggggacgtcgcgccgcaccgcgtccgcgctcgggggtggtttcgcgctgctcctcttcccgactggccatttccttctcctataggcagaaaaagatcatggagtcagtcgagaagaaggacagcctaaccgccccctctgagttcgccaccaccgcctccaccgatgccgccaacgcgcctaccaccttccccgtcgaggcacccccgcttgaggaggaggaagtgattatcgagcaggacccaggttttgtaagcgaagacgacgaggaccgctcagtaccaacagaggataaaaagcaagaccaggacaacgcagaggcaaacgaggaacaagtcgggcggggggacgaaaggcatggcgactacctagatgtgggagacgacgtgctgttgaagcatctgcagcgccagtgcgccattatctgcgacgcgttgcaagagcgcagcgatgtgcccctcgccatagcggatgtcagccttgcctacgaacgccacctattctcaccgcgcgtaccccccaaacgccaagaaaacggcacatgcgagcccaacccgcgcctcaacttctaccccgtatttgccgtgccagaggtgcttgccacctatcacatctttttccaaaactgcaagatacccctatcctgccgtgccaaccgcagccgagcggacaagcagctggccttgcggcagggcgctgtcatacctgatatcgcctcgctcaacgaagtgccaaaaatctttgagggtcttggacgcgacgagaagcgcgcggcaaacgctctgcaacaggaaaacagcgaaaatgaaagtcactctggagtgttggtggaactcgagggtgacaacgcgcgcctagccgtactaaaacgcagcatcgaggtcacccactttgcctacccggcacttaacctaccccccaaggtcatgagcacagtcatgagtgagctgatcgtgcgccgtgcgcagcccctggagagggatgcaaatttgcaagaacaaacagaggagggcctacccgcagttggcgacgagcagctagcgcgctggcttcaaacgcgcgagcctgccgacttggaggagcgacgcaaactaatgatggccgcagtgctcgttaccgtggagcttgagtgcatgcagcggttctttgctgacccggagatgcagcgcaagctagaggaaacattgcactacacctttcgacagggctacgtacgccaggcctgcaagatctccaacgtggagctctgcaacctggtctcctaccttggaattttgcacgaaaaccgccttgggcaaaacgtgcttcattccacgctcaagggcgaggcgcgccgcgactacgtccgcgactgcgtttacttatttctatgctacacctggcagacggccatgggcgtttggcagcagtgcttggaggagtgcaacctcaaggagctgcagaaactgctaaagcaaaacttgaaggacctatggacggccttcaacgagcgctccgtggccgcgcacctggcggacatcattttccccgaacgcctgcttaaaaccctgcaacagggtctgccagacttcaccagtcaaagcatgttgcagaactttaggaactttatcctagagcgctcaggaatcttgcccgccacctgctgtgcacttcctagcgactttgtgcccattaagtaccgcgaatgccctccgccgctttggggccactgctaccttctgcagctagccaactaccttgcctaccactctgacataatggaagacgtgagcggtgacggtctactggagtgtcactgtcgctgcaacctatgcaccccgcaccgctccctggtttgcaattcgcagctgcttaacgaaagtcaaattatcggtacctttgagctgcagggtccctcgcctgacgaaaagtccgcggctccggggttgaaactcactccggggctgtggacgtcggcttaccttcgcaaatttgtacctgaggactaccacgcccacgagattaggttctacgaagaccaatcccgcccgcctaatgcggagcttaccgcctgcgtcattacccagggccacattcttggccaattgcaagccatcaacaaagcccgccaagagtttctgctacgaaagggacggggggtttacttggacccccagtccggcgaggagctcaacccaatccccccgccgccgcagccctatcagcagcagccgcgggcccttgcttcccaggtgatgacccaaaaagaagctgcagctgccgccgccacccacggacgaggaggaatactgggacagtcaggcagaggaggttttggacgaggaggaggaggacatgatggaagactgggagagcctagacgaggaagcttccgaggtcgaagaggtgtcagacgaaacaccgtcaccctcggtcgcattcccctcgccggcgccccagaaatcggcaaccggttccagcatggctacaacctccgctcctcaggcgccgccggcactgcccgttcgccgacccaaccgtagatgggacaccactggaaccagggccggtaagtccaagcagccgccgccgttagcccaagagcaacaacagcgccaaggctaccgctcatggcgcgggcacaagaacgccatagttgcttgcttgcaagactgtgggggcaacatctccttcgcccgccgctttcttctctaccatcacggcgtggccttcccccgtaacatcctgcattactaccgtcatctctacagcccatactgcaccggcggcagcggcagcaacagcagcggccacacagaagcaaaggcgaccggatagcaagactctgacaaagcccaagaaatccacagcggcggcagcagcaggaggaggagcgctgcgtctggcgcccaacgaacccgtatcgacccgcgagcttagaaacaggatttttcccactctgtatgctatatttcaacagagcaggggccaagaacaagagctgaaaataaaaaacaggtctctgcgatccctcacccgcagctgcctgtatcacaaaagcgaagatcagcttcggcgcacgctggaagacgcggaggctctcttcagtaaatactgcgcgctgactcttaaggactagtttcgcgccctttctcaaatttaagcgcgaaaactacgtcatctccagcggccacacccggcgccagcacctgttgtcagcgccattttttagggcggagtaacttgtatgtgttgggaattgtagttttcttaaaatgggaagtgacgtaacgtgggaaaacggaagtgacgatttgaggaagttgtgggttttttggctttcgtttctgggcgtaggttcgcgtgcggttttctgggtgttttttgtggactttaaccgttacgtcattttttagtcctatatatactcgctctgcacttggcccttttttacactgtgactgattgagctggtgccgtgtcgagtggtgtttttttaataggttttcttttttactggtaaggctgactgttatgactacgtccggcgttccatttggcatgacactacgaccaacacgatctcggttgtctcggcgcactccgtacagtagggatcgtctacctccttttgagacagaaacccgcgctaccatactggaggatcatccgctgctgcccgaatgtaacactttgacaatgcacaacgtgagttacgtgcgaggtcttccctgcagtgtgggatttacgctgattcaggaatgggttgttccctgggatatggttctaacgcgggaggagcttgtaatcctgaggaagtgtatgcacgtgtgcctgtgttgtgccaacattgatatcatgacgagcatgatgatccatggttacgagtcctgggctctccactgtcattgttccagtcccggttccctgcagtgtatagccggcgggcaggttttggccagctggtttaggatggtggtggatggcgccatgtttaatcagaggtttatatggtaccgggaggtggtgaattacaacatgccaaaagaggtaatgtttatgtccagcgtgtttatgaggggtcgccacttaatctacctgcgcttgtggtatgatggccacgtgggttctgtggtccccgccatgagctttggatacagcgccttgcactgtgggattttgaacaatattgtggtgctgtgctgcagttactgtgctgatttaagtgagatcagggtgcgctgctgtgcccggaggacaaggcgccttatgctgcgggcggtgcgaatcatcgctgaggagaccactgccatgttgtattcctgcaggacggagcggcggcggcagcagtttattcgcgcgctgctgcagcaccaccgccctatcctgatgcacgattatgactctacccccatgtaggcgtggacttctccttcgccgcccgttaagcaaccgcaagttggacagcagcctgtggctcagcagctggacagcgacatgaacttaagtgagctgcccggggagtttattaatatcactgatgagcgtttggctcgacaggaaaccgtgtggaatataacacctaagaatatgtctgttacccatgatatgatgctttttaaggccagccggggagaaaggactgtgtactctgtgtgttgggagggaggtggcaggttgaatactagggttctgtga

SEQ ID NO: 114 - DNA, 6197 bp, synthetic construct
  source 1..6197: mol_type = other DNA
ttaaaaatcaaaggggttctgccgcgcatcgctatgcgccactggcagggacacgttgcgatactggtgtttagtgctccacttaaactcaggcacaaccatccgcggcagctcggtgaagttttcactccacaggctgcgcaccatcaccaacgcgtttagcaggtcgggcgccgatatcttgaagtcgcagttggggcctccgccctgcgcgcgcgagttgcgatacacagggttgcagcactggaacactatcagcgccgggtggtgcacgctggccagcacgctcttgtcggagatcagatccgcgtccaggtcctccgcgttgctcagggcgaacggagtcaactttggtagctgccttcccaaaaagggcgcgtgcccaggctttgagttgcactcgcaccgtagtggcatcaaaaggtgaccgtgcccggtctgggcgttaggatacagcgcctgcataaaagccttgatctgcttaaaagccacctgagcctttgcgccttcagagaagaacatgccgcaagacttgccggaaaactgattggccggacaggccgcgtcgtgcacgcagcaccttgcgtcggtgttggagatctgcaccacatttcggccccaccggttcttcacgatcttggccttgctagactgctccttcagcgcgcgctgcccgttttcgctcgtcacatccatttcaatcacgtgctccttatttatcataatgcttccgtgtagacacttaagctcgccttcgatctcagcgcagcggtgcagccacaacgcgcagcccgtgggctcgtgatgcttgtaggtcacctctgcaaacgactgcaggtacgcctgcaggaatcgccccatcatcgtcacaaaggtcttgttgctggtgaaggtcagctgcaacccgcggtgctcctcgttcagccaggtcttgcatacggccgccagagcttccacttggtcaggcagtagtttgaagttcgcctttagatcgttatccacgtggtacttgtccatcagcgcgcgcgcagcctccatgcccttctcccacgcagacacgatcggcacactcagcgggttcatcaccgtaatttcactttccgcttcgctgggctcttcctcttcctcttgcgtccgcataccacgcgccactgggtcgtcttcattcagccgccgcactgtgcgcttacctcctttgccatgcttgattagcaccggtgggttgctgaaacccaccatttgtagcgccacatcttctctttcttcctcgctgtccacgattacctctggtgatggcgggcgctcgggcttgggagaagggcgcttctttttcttcttgggcgcaatggccaaatccgccgccgaggtcgatggccgcgggctgggtgtgcgcggcaccagcgcgtcttgtgatgagtcttcctcgtcctcggactcgatacgccgcctcatccgcttttttgggggcgcccggggaggcggcggcgacggggacggggacgacacgtcctccatggttgggggacgtcgcgccgcaccgcgtccgcgctcgggggtggtttcgcgctgctcctcttcccgactggccatttccttctcctataggcagaaaaagatctgatgatcagtcgagaagaaggacagcctaaccgccccctctgagttcgccaccaccgcctccaccgatgccgccaacgcgcctaccaccttccccgtcgaggcacccccgcttgaggaggaggaagtgattatcgagcaggacccaggttttgtaagcgaagacgacgaggaccgctcagtaccaacagaggataaaaagcaagaccaggacaacgcagaggcaaacgaggaacaagtcgggcggggggacgaaaggcatggcgactacctagatgtgggagacgacgtgctgttgaagcatctgcagcgccagtgcgccattatctgcgacgcgttgcaagagcgcagcgatgtgcccctcgccatagcggatgtcagccttgcctacgaacgccacctattctcaccgcgcgtaccccccaaacgccaagaaaacggcacatgcgagcccaacccgcgcctcaacttctaccccgtatttgccgtgccagaggtgcttgccacctatcacatctttttccaaaactgcaagatacccctatcctgccgtgccaaccgcagccgagcggacaagcagctggccttgcggcagggcgctgtcatacctgatatcgcctcgctcaacgaagtgccaaaaatctttgagggtcttggacgcgacgagaagcgcgcggcaaacgctctgcaacaggaaaacagcgaaaatgaaagtcactctggagtgttggtggaactcgagggtgacaacgcgcgcctagccgtactaaaacgcagcatcgaggtcacccactttgcctacccggcacttaacctaccccccaaggtcatgagcacagtcatgagtgagctgatcgtgcgccgtgcgcagcccctggagagggatgcaaatttgcaagaacaaacagaggagggcctacccgcagttggcgacgagcagctagcgcgctggcttcaaacgcgcgagcctgccgacttggaggagcgacgcaaactaatgatggccgcagtgctcgttaccgtggagcttgagtgcatgcagcggttctttgctgacccggagatgcagcgcaagctagaggaaacattgcactacacctttcgacagggctacgtacgccaggcctgcaagatctccaacgtggagctctgcaacctggtctcctaccttggaattttgcacgaaaaccgccttgggcaaaacgtgcttcattccacgctcaagggcgaggcgcgccgcgactacgtccgcgactgcgtttacttatttctatgctacacctggcagacggccatgggcgtttggcagcagtgcttggaggagtgcaacctcaaggagctgcagaaactgctaaagcaaaacttgaaggacctatggacggccttcaacgagcgctccgtggccgcgcacctggcggacatcattttccccgaacgcctgcttaaaaccctgcaacagggtctgccagacttcaccagtcaaagcatgttgcagaactttaggaactttatcctagagcgctcaggaatcttgcccgccacctgctgtgcacttcctagcgactttgtgcccattaagtaccgcgaatgccctccgccgctttggggccactgctaccttctgcagctagccaactaccttgcctaccactctgacataatggaagacgtgagcggtgacggtctactggagtgtcactgtcgctgcaacctatgcaccccgcaccgctccctggtttgcaattcgcagctgcttaacgaaagtcaaattatcggtacctttgagctgcagggtccctcgcctgacgaaaagtccgcggctccggggttgaaactcactccggggctgtggacgtcggcttaccttcgcaaatttgtacctgaggactaccacgcccacgagattaggttctacgaagaccaatcccgcccgcctaatgcggagcttaccgcctgcgtcattacccagggccacattcttggccaattgcaagccatcaacaaagcccgccaagagtttctgctacgaaagggacggggggtttacttggacccccagtccggcgaggagctcaacccaatccccccgccgccgcagccctatcagcagcagccgcgggcccttgcttcccaggatggcacccaaaaagaagctgcagctgccgccgccacccacggacgaggaggaatactgggacagtcaggcagaggaggttttggacgaggaggaggaggacatgatggaagactgggagagcctagacgaggaagcttccgaggtcgaagaggtgtcagacgaaacaccgtcaccctcggtcgcattcccctcgccggcgccccagaaatcggcaaccggttccagcatggctacaacctccgctcctcaggcgccgccggcactgcccgttcgccgacccaaccgtagatgggacaccactggaaccagggccggtaagtccaagcagccgccgccgttagcccaagagcaacaacagcgccaaggctaccgctcatggcgcgggcacaagaacgccatagttgcttgcttgcaagactgtgggggcaacatctccttcgcccgccgctttcttctctaccatcacggcgtggccttcccccgtaacatcctgcattactaccgtcatctctacagcccatactgcaccggcggcagcggcagcaacagcagcggccacacagaagcaaaggcgaccggatagcaagactctgacaaagcccaagaaatccacagcggcggcagcagcaggaggaggagcgctgcgtctggcgcccaacgaacccgtatcgacccgcgagcttagaaacaggatttttcccactctgtatgctatatttcaacagagcaggggccaagaacaagagctgaaaataaaaaacaggtctctgcgatccctcacccgcagctgcctgtatcacaaaagcgaagatcagcttcggcgcacgctggaagacgcggaggctctcttcagtaaatactgcgcgctgactcttaaggactagtttcgcgccctttctcaaatttaagcgcgaaaactacgtcatctccagcggccacacccggcgccagcacctgttgtcagcgccattttttagggcggagtaacttgtatgtgttgggaattgtagttttcttaaaatgggaagtgacgtaacgtgggaaaacggaagtgacgatttgaggaagttgtgggttttttggctttcgtttctgggcgtaggttcgcgtgcggttttctgggtgttttttgtggactttaaccgttacgtcattttttagtcctatatatactcgctctgcacttggcccttttttacactgtgactgattgagctggtgccgtgtcgagtggtgtttttttaataggttttcttttttactggtaaggctgactgttatgactacgtccggcgttccatttggcatgacactacgaccaacacgatctcggttgtctcggcgcactccgtacagtagggatcgtctacctccttttgagacagaaacccgcgctaccatactggaggatcatccgctgctgcccgaatgtaacactttgacaatgcacaacgtgagttacgtgcgaggtcttccctgcagtgtgggatttacgctgattcaggaatgggttgttccctgggatatggttctaacgcgggaggagcttgtaatcctgaggaagtgtatgcacgtgtgcctgtgttgtgccaacattgatatcatgacgagcatgatgatccatggttacgagtcctgggctctccactgtcattgttccagtcccggttccctgcagtgtatagccggcgggcaggttttggccagctggtttaggatggtggtggatggcgccatgtttaatcagaggtttatatggtaccgggaggtggtgaattacaacatgccaaaagaggtaatgtttatgtccagcgtgtttatgaggggtcgccacttaatctacctgcgcttgtggtatgatggccacgtgggttctgtggtccccgccatgagctttggatacagcgccttgcactgtgggattttgaacaatattgtggtgctgtgctgcagttactgtgctgatttaagtgagatcagggtgcgctgctgtgcccggaggacaaggcgccttatgctgcgggcggtgcgaatcatcgctgaggagaccactgccatgttgtattcctgcaggacggagcggcggcggcagcagtttattcgcgcgctgctgcagcaccaccgccctatcctgatgcacgattatgactctacccccatgtaggcgtggacttctccttcgccgcccgttaagcaaccgcaagttggacagcagcctgtggctcagcagctggacagcgacatgaacttaagtgagctgcccggggagtttattaatatcactgatgagcgtttggctcgacaggaaaccgtgtggaatataacacctaagaatatgtctgttacccatgatatgatgctttttaaggccagccggggagaaaggactgtgtactctgtgtgttgggagggaggtggcaggttgaatactagggttctgtga

SEQ ID NO: 115 - DNA, 6203 bp, synthetic construct
  source 1..6203: mol_type = other DNA
ttaaaaatcaaaggggttctgccgcgcatcgctatgcgccactggcagggacacgttgcgatactggtgtttagtgctccacttaaactcaggcacaaccatccgcggcagctcggtgaagttttcactccacaggctgcgcaccatcaccaacgcgtttagcaggtcgggcgccgatatcttgaagtcgcagttggggcctccgccctgcgcgcgcgagttgcgatacacagggttgcagcactggaacactatcagcgccgggtggtgcacgctggccagcacgctcttgtcggagatcagatccgcgtccaggtcctccgcgttgctcagggcgaacggagtcaactttggtagctgccttcccaaaaagggcgcgtgcccaggctttgagttgcactcgcaccgtagtggcatcaaaaggtgaccgtgcccggtctgggcgttaggatacagcgcctgcataaaagccttgatctgcttaaaagccacctgagcctttgcgccttcagagaagaacatgccgcaagacttgccggaaaactgattggccggacaggccgcgtcgtgcacgcagcaccttgcgtcggtgttggagatctgcaccacatttcggccccaccggttcttcacgatcttggccttgctagactgctccttcagcgcgcgctgcccgttttcgctcgtcacatccatttcaatcacgtgctccttatttatcataatgcttccgtgtagacacttaagctcgccttcgatctcagcgcagcggtgcagccacaacgcgcagcccgtgggctcgtgatgcttgtaggtcacctctgcaaacgactgcaggtacgcctgcaggaatcgccccatcatcgtcacaaaggtcttgttgctggtgaaggtcagctgcaacccgcggtgctcctcgttcagccaggtcttgcatacggccgccagagcttccacttggtcaggcagtagtttgaagttcgcctttagatcgttatccacgtggtacttgtccatcagcgcgcgcgcagcctccatgcccttctcccacgcagacacgatcggcacactcagcgggttcatcaccgtaatttcactttccgcttcgctgggctcttcctcttcctcttgcgtccgcataccacgcgccactgggtcgtcttcattcagccgccgcactgtgcgcttacctcctttgccatgcttgattagcaccggtgggttgctgaaacccaccatttgtagcgccacatcttctctttcttcctcgctgtccacgattacctctggtgatggcgggcgctcgggcttgggagaagggcgcttctttttcttcttgggcgcaatggccaaatccgccgccgaggtcgatggccgcgggctgggtgtgcgcggcaccagcgcgtcttgtgatgagtcttcctcgtcctcggactcgatacgccgcctcatccgcttttttgggggcgcccggggaggcggcggcgacggggacggggacgacacgtcctccatggttgggggacgtcgcgccgcaccgcgtccgcgctcgggggtggtttcgcgctgctcctcttcccgactggccatttccttctcctataggcagaaaaagatctgatgagagtcagtcgagaagaaggacagcctaaccgccccctctgagttcgccaccaccgcctccaccgatgccgccaacgcgcctaccaccttccccgtcgaggcacccccgcttgaggaggaggaagtgattatcgagcaggacccaggttttgtaagcgaagacgacgaggaccgctcagtaccaacagaggataaaaagcaagaccaggacaacgcagaggcaaacgaggaacaagtcgggcggggggacgaaaggcatggcgactacctagatgtgggagacgacgtgctgttgaagcatctgcagcgccagtgcgccattatctgcgacgcgttgcaagagcgcagcgatgtgcccctcgccatagcggatgtcagccttgcctacgaacgccacctattctcaccgcgcgtaccccccaaacgccaagaaaacggcacatgcgagcccaacccgcgcctcaacttctaccccgtatttgccgtgccagaggtgcttgccacctatcacatctttttccaaaactgcaagatacccctatcctgccgtgccaaccgcagccgagcggacaagcagctggccttgcggcagggcgctgtcatacctgatatcgcctcgctcaacgaagtgccaaaaatctttgagggtcttggacgcgacgagaagcgcgcggcaaacgctctgcaacaggaaaacagcgaaaatgaaagtcactctggagtgttggtggaactcgagggtgacaacgcgcgcctagccgtactaaaacgcagcatcgaggtcacccactttgcctacccggcacttaacctaccccccaaggtcatgagcacagtcatgagtgagctgatcgtgcgccgtgcgcagcccctggagagggatgcaaatttgcaagaacaaacagaggagggcctacccgcagttggcgacgagcagctagcgcgctggcttcaaacgcgcgagcctgccgacttggaggagcgacgcaaactaatgatggccgcagtgctcgttaccgtggagcttgagtgcatgcagcggttctttgctgacccggagatgcagcgcaagctagaggaaacattgcactacacctttcgacagggctacgtacgccaggcctgcaagatctccaacgtggagctctgcaacctggtctcctaccttggaattttgcacgaaaaccgccttgggcaaaacgtgcttcattccacgctcaagggcgaggcgcgccgcgactacgtccgcgactgcgtttacttatttctatgctacacctggcagacggccatgggcgtttggcagcagtgcttggaggagtgcaacctcaaggagctgcagaaactgctaaagcaaaacttgaaggacctatggacggccttcaacgagcgctccgtggccgcgcacctggcggacatcattttccccgaacgcctgcttaaaaccctgcaacagggtctgccagacttcaccagtcaaagcatgttgcagaactttaggaactttatcctagagcgctcaggaatcttgcccgccacctgctgtgcacttcctagcgactttgtgcccattaagtaccgcgaatgccctccgccgctttggggccactgctaccttctgcagctagccaactaccttgcctaccactctgacataatggaagacgtgagcggtgacggtctactggagtgtcactgtcgctgcaacctatgcaccccgcaccgctccctggtttgcaattcgcagctgcttaacgaaagtcaaattatcggtacctttgagctgcagggtccctcgcctgacgaaaagtccgcggctccggggttgaaactcactccggggctgtggacgtcggcttaccttcgcaaatttgtacctgaggactaccacgcccacgagattaggttctacgaagaccaatcccgcccgcctaatgcggagcttaccgcctgcgtcattacccagggccacattcttggccaattgcaagccatcaacaaagcccgccaagagtttctgctacgaaagggacggggggtttacttggacccccagtccggcgaggagctcaacccaatccccccgccgccgcagccctatcagcagcagccgcgggcccttgcttcccaggtgatgagcacccaaaaagaagctgcagctgccgccgccacccacggacgaggaggaatactgggacagtcaggcagaggaggttttggacgaggaggaggaggacatgatggaagactgggagagcctagacgaggaagcttccgaggtcgaagaggtgtcagacgaaacaccgtcaccctcggtcgcattcccctcgccggcgccccagaaatcggcaaccggttccagcatggctacaacctccgctcctcaggcgccgccggcactgcccgttcgccgacccaaccgtagatgggacaccactggaaccagggccggtaagtccaagcagccgccgccgttagcccaagagcaacaacagcgccaaggctaccgctcatggcgcgggcacaagaacgccatagttgcttgcttgcaagactgtgggggcaacatctccttcgcccgccgctttcttctctaccatcacggcgtggccttcccccgtaacatcctgcattactaccgtcatctctacagcccatactgcaccggcggcagcggcagcaacagcagcggccacacagaagcaaaggcgaccggatagcaagactctgacaaagcccaagaaatccacagcggcggcagcagcaggaggaggagcgctgcgtctggcgcccaacgaacccgtatcgacccgcgagcttagaaacaggatttttcccactctgtatgctatatttcaacagagcaggggccaagaacaagagctgaaaataaaaaacaggtctctgcgatccctcacccgcagctgcctgtatcacaaaagcgaagatcagcttcggcgcacgctggaagacgcggaggctctcttcagtaaatactgcgcgctgactcttaaggactagtttcgcgccctttctcaaatttaagcgcgaaaactacgtcatctccagcggccacacccggcgccagcacctgttgtcagcgccattttttagggcggagtaacttgtatgtgttgggaattgtagttttcttaaaatgggaagtgacgtaacgtgggaaaacggaagtgacgatttgaggaagttgtgggttttttggctttcgtttctgggcgtaggttcgcgtgcggttttctgggtgttttttgtggactttaaccgttacgtcattttttagtcctatatatactcgctctgcacttggcccttttttacactgtgactgattgagctggtgccgtgtcgagtggtgtttttttaataggttttcttttttactggtaaggctgactgttatgactacgtccggcgttccatttggcatgacactacgaccaacacgatctcggttgtctcggcgcactccgtacagtagggatcgtctacctccttttgagacagaaacccgcgctaccatactggaggatcatccgctgctgcccgaatgtaacactttgacaatgcacaacgtgagttacgtgcgaggtcttccctgcagtgtgggatttacgctgattcaggaatgggttgttccctgggatatggttctaacgcgggaggagcttgtaatcctgaggaagtgtatgcacgtgtgcctgtgttgtgccaacattgatatcatgacgagcatgatgatccatggttacgagtcctgggctctccactgtcattgttccagtcccggttccctgcagtgtatagccggcgggcaggttttggccagctggtttaggatggtggtggatggcgccatgtttaatcagaggtttatatggtaccgggaggtggtgaattacaacatgccaaaagaggtaatgtttatgtccagcgtgtttatgaggggtcgccacttaatctacctgcgcttgtggtatgatggccacgtgggttctgtggtccccgccatgagctttggatacagcgccttgcactgtgggattttgaacaatattgtggtgctgtgctgcagttactgtgctgatttaagtgagatcagggtgcgctgctgtgcccggaggacaaggcgccttatgctgcgggcggtgcgaatcatcgctgaggagaccactgccatgttgtattcctgcaggacggagcggcggcggcagcagtttattcgcgcgctgctgcagcaccaccgccctatcctgatgcacgattatgactctacccccatgtaggcgtggacttctccttcgccgcccgttaagcaaccgcaagttggacagcagcctgtggctcagcagctggacagcgacatgaacttaagtgagctgcccggggagtttattaatatcactgatgagcgtttggctcgacaggaaaccgtgtggaatataacacctaagaatatgtctgttacccatgatatgatgctttttaaggccagccggggagaaaggactgtgtactctgtgtgttgggagggaggtggcaggttgaatactagggttctgtga

SEQ ID NO: 116 - DNA, 4371 bp, synthetic construct
  source 1..4371: mol_type = other DNA
tcagaagtcgaaggggttctgtctggcatcggaatgggccacgggcagagacacgttccggtactggtgcttggtggaccacttgaactcaggcacgaccattctaggcagctctgtgaagttctcgctccacaggctccgcaccatcaccagggcgttcagcaggtcaggggcgctgattttgaagtcgcagttaggtccgccgccctgggctctgctgtttctgtacacagggttgcagcactggaacacaataagagcagggtggtgcacgctggccagcacagacttgtcgctgatcaggtcggcgtcgagatcctcggcgttagacaaggcaaaaggggtcagcttgggcagctggcggcccaggaaaggggcgtggccgggcttgctattgcactcgcatctcagaggcatcagcaggtggccgtggccggtctgggcgttggggtacagggcctgcataaaggccttgatctgtttgaaggccacttgggccttggcgccttcggagaagaacatgccgcagcttttgccgctgaactggttggcggggcaggcggcgtcgtgcacacaacaccgggcgtcggtattgctgatctgcaccacgtttctgccccatctgttcttcacgatcttggccttgctgctctgctctttcagggccctctggccgttctcagaggtgacgtccatctcgatcacatgttccttgttgatcatgatgctgccgtgcagacacttcagctcgccctcgatttccgcgcatctgtgcagccacagggcacaaccggtaggctcgtggtgcttgtatgtcacctcagcaaaagattgcaggtaggcttgcaggaatctgcccatcatggtcacgaaggtcttgttggaggtaaaagtcagctgcagtcctctgtgttcctcgttcagccatgtcttgcacacggcggccagagcctcgacctgatctggcagcagcttgaaattagccttcaggtcgttgtccacgtgatacttatccatcagtgctctggcggcttccatgcccttctcccaggcggaaacgatgggcacgctcagggggttcatcacggtgatctcgctttcagcttctgaaggttcctcctcttcctcctgtgttctcatgccccgagccacggggtcgtcctcattcagtctccgcacggttctttttcctccctttccgtgcttaatcagtacaggaggattagagaagcccaccatctggagggcgacgtcctccctttcttcttcgctatccacgatcacttctgggctggggggccgttcaggctttgggctaggccgtttttttttcttcttaggggcgatagccagatcagcggcgcttgtagagggccgaggactaggggttctaggcacgagggcgtcctggctgctgtcctcctcatcctcgctctcgatccgtctccgcattctcttcttagggggggcccgcggagggggagggctagggctaggggacgacacatcttccatggttggaggtctgcgagcagcgcctctgcctctctctggtgttgtctcgcgctgttcttcctctctagaggccatttccttctcctataggcagaaaaagatcgttgaaactcactccggggctgtggacgtcggcttaccttcgcaaatttgtacctgaggactaccacgcccacgagattaggttctacgaagaccaatcccgcccgcctaatgcggagcttaccgcctgcgtcattacccagggccacattcttggccaattgcaagccatcaacaaagcccgccaagagtttctgctacgaaagggacggggggtttacttggacccccagtccggcgaggagctcaacccaatccccccgccgccgcagccctatcagcagcagccgcgggcccttgcttcccaggatggcacccaaaaagaagctgcagctgccgccgccacccacggacgaggaggaatactgggacagtcaggcagaggaggttttggacgaggaggaggaggacatgatggaagactgggagagcctagacgaggaagcttccgaggtcgaagaggtgtcagacgaaacaccgtcaccctcggtcgcattcccctcgccggcgccccagaaatcggcaaccggttccagcatggctacaacctccgctcctcaggcgccgccggcactgcccgttcgccgacccaaccgtagatgggacaccactggaaccagggccggtaagtccaagcagccgccgccgttagcccaagagcaacaacagcgccaaggctaccgctcatggcgcgggcacaagaacgccatagttgcttgcttgcaagactgtgggggcaacatctccttcgcccgccgctttcttctctaccatcacggcgtggccttcccccgtaacatcctgcattactaccgtcatctctacagcccatactgcaccggcggcagcggcagcaacagcagcggccacacagaagcaaaggcgaccggatagcaagactctgacaaagcccaagaaatccacagcggcggcagcagcaggaggaggagcgctgcgtctggcgcccaacgaacccgtatcgacccgcgagcttagaaacaggatttttcccactctgtatgctatatttcaacagagcaggggccaagaacaagagctgaaaataaaaaacaggtctctgcgatccctcacccgcagctgcctgtatcacaaaagcgaagatcagcttcggcgcacgctggaagacgcggaggctctcttcagtaaatactgcgcgctgactcttaaggactagtttcgcgccctttctcaaatttaagcgcgaaaactacgtcatctccagcggccacacccggcgccagcacctgttgtcagcgccattttttagggcggagtaacttgtatgtgttgggaattgtagttttcttaaaatgggaagtgacgtaacgtgggaaaacggaagtgacgatttgaggaagttgtgggttttttggctttcgtttctgggcgtaggttcgcgtgcggttttctgggtgttttttgtggactttaaccgttacgtcattttttagtcctatatatactcgctctgcacttggcccttttttacactgtgactgattgagctggtgccgtgtcgagtggtgtttttttaataggttttcttttttactggtaaggctgactgttatgactacgtccggcgttccatttggcatgacactacgaccaacacgatctcggttgtctcggcgcactccgtacagtagggatcgtctacctccttttgagacagaaacccgcgctaccatactggaggatcatccgctgctgcccgaatgtaacactttgacaatgcacaacgtgagttacgtgcgaggtcttccctgcagtgtgggatttacgctgattcaggaatgggttgttccctgggatatggttctaacgcgggaggagcttgtaatcctgaggaagtgtatgcacgtgtgcctgtgttgtgccaacattgatatcatgacgagcatgatgatccatggttacgagtcctgggctctccactgtcattgttccagtcccggttccctgcagtgtatagccggcgggcaggttttggccagctggtttaggatggtggtggatggcgccatgtttaatcagaggtttatatggtaccgggaggtggtgaattacaacatgccaaaagaggtaatgtttatgtccagcgtgtttatgaggggtcgccacttaatctacctgcgcttgtggtatgatggccacgtgggttctgtggtccccgccatgagctttggatacagcgccttgcactgtgggattttgaacaatattgtggtgctgtgctgcagttactgtgctgatttaagtgagatcagggtgcgctgctgtgcccggaggacaaggcgccttatgctgcgggcggtgcgaatcatcgctgaggagaccactgccatgttgtattcctgcaggacggagcggcggcggcagcagtttattcgcgcgctgctgcagcaccaccgccctatcctgatgcacgattatgactctacccccatgtaggcgtggacttctccttcgccgcccgttaagcaaccgcaagttggacagcagcctgtggctcagcagctggacagcgacatgaacttaagtgagctgcccggggagtttattaatatcactgatgagcgtttggctcgacaggaaaccgtgtggaatataacacctaagaatatgtctgttacccatgatatgatgctttttaaggccagccggggagaaaggactgtgtactctgtgtgttgggagggaggtggcaggttgaatactagggttctgtga

SEQ ID NO: 117 - DNA, 4371 bp, synthetic construct
  source 1..4371: mol_type = other DNA
ttaaaaatcaaaggggttctgccgcgcatcgctatgcgccactggcagggacacgttgcgatactggtgtttagtgctccacttaaactcaggcacaaccatccgcggcagctcggtgaagttttcactccacaggctgcgcaccatcaccaacgcgtttagcaggtcgggcgccgatatcttgaagtcgcagttggggcctccgccctgcgcgcgcgagttgcgatacacagggttgcagcactggaacactatcagcgccgggtggtgcacgctggccagcacgctcttgtcggagatcagatccgcgtccaggtcctccgcgttgctcagggcgaacggagtcaactttggtagctgccttcccaaaaagggcgcgtgcccaggctttgagttgcactcgcaccgtagtggcatcaaaaggtgaccgtgcccggtctgggcgttaggatacagcgcctgcataaaagccttgatctgcttaaaagccacctgagcctttgcgccttcagagaagaacatgccgcaagacttgccggaaaactgattggccggacaggccgcgtcgtgcacgcagcaccttgcgtcggtgttggagatctgcaccacatttcggccccaccggttcttcacgatcttggccttgctagactgctccttcagcgcgcgctgcccgttttcgctcgtcacatccatttcaatcacgtgctccttatttatcataatgcttccgtgtagacacttaagctcgccttcgatctcagcgcagcggtgcagccacaacgcgcagcccgtgggctcgtgatgcttgtaggtcacctctgcaaacgactgcaggtacgcctgcaggaatcgccccatcatcgtcacaaaggtcttgttgctggtgaaggtcagctgcaacccgcggtgctcctcgttcagccaggtcttgcatacggccgccagagcttccacttggtcaggcagtagtttgaagttcgcctttagatcgttatccacgtggtacttgtccatcagcgcgcgcgcagcctccatgcccttctcccacgcagacacgatcggcacactcagcgggttcatcaccgtaatttcactttccgcttcgctgggctcttcctcttcctcttgcgtccgcataccacgcgccactgggtcgtcttcattcagccgccgcactgtgcgcttacctcctttgccatgcttgattagcaccggtgggttgctgaaacccaccatttgtagcgccacatcttctctttcttcctcgctgtccacgattacctctggtgatggcgggcgctcgggcttgggagaagggcgcttctttttcttcttgggcgcaatggccaaatccgccgccgaggtcgatggccgcgggctgggtgtgcgcggcaccagcgcgtcttgtgatgagtcttcctcgtcctcggactcgatacgccgcctcatccgcttttttgggggcgcccggggaggcggcggcgacggggacggggacgacacgtcctccatggttgggggacgtcgcgccgcaccgcgtccgcgctcgggggtggtttcgcgctgctcctcttcccgactggccatttccttctcctataggcagaaaaagatcgttgaaactcactccggggctgtggacgtcggcttaccttcgcaaatttgtacctgaggactaccacgcccacgagattaggttctacgaagaccaatcccgcccgcctaatgcggagcttaccgcctgcgtcattacccagggccacattcttggccaattgcaagccatcaacaaagcccgccaagagtttctgctacgaaagggacggggggtttacttggacccccagtccggcgaggagctcaacccaatccccccgccgccgcagccctatcagcagcagccgcgggcccttgcttcccaggatggcacccaaaaagaagctgcagctgccgccgccacccacggacgaggaggaatactgggacagtcaggcagaggaggttttggacgaggaggaggaggacatgatggaagactgggagagcctagacgaggaagcttccgaggtcgaagaggtgtcagacgaaacaccgtcaccctcggtcgcattcccctcgccggcgccccagaaatcggcaaccggttccagcatggctacaacctccgctcctcaggcgccgccggcactgcccgttcgccgacccaaccgtagatgggacaccactggaaccagggccggtaagtccaagcagccgccgccgttagcccaagagcaacaacagcgccaaggctaccgctcatggcgcgggcacaagaacgccatagttgcttgcttgcaagactgtgggggcaacatctccttcgcccgccgctttcttctctaccatcacggcgtggccttcccccgtaacatcctgcattactaccgtcatctctacagcccatactgcaccggcggcagcggcagcaacagcagcggccacacagaagcaaaggcgaccggatagcaagactctgacaaagcccaagaaatccacagcggcggcagcagcaggaggaggagcgctgcgtctggcgcccaacgaacccgtatcgacccgcgagcttagaaacaggatttttcccactctgtatgctatatttcaacagagcaggggccaagaacaagagctgaaaataaaaaacaggtctctgcgatccctcacccgcagctgcctgtatcacaaaagcgaagatcagcttcggcgcacgctggaagacgcggaggctctcttcagtaaatactgcgcgctgactcttaaggactagtttcgcgccctttctcaaatttaagcgcgaaaactacgtcatctccagcggccacacccggcgccagcacctgttgtcagcgccattttttagggcggagtaacttgtatgtgttgggaattgtagttttcttaaaatgggaagtgacgtaacgtgggaaaacggaagtgacgatttgaggaagttgtgggttttttggctttcgtttctgggcgtaggttcgcgtgcggttttctgggtgttttttgtggactttaaccgttacgtcattttttagtcctatatatactcgctctgcacttggcccttttttacactgtgactgattgagctggtgccgtgtcgagtggtgtttttttaataggttttcttttttactggtaaggctgactgttatgacaacctccggcgtgcctttcggcatgaccctgagacctaccagatctcggctgagcagacggaccccttacagccgggacagactgcctccattcgagacagaaacaagagccaccatcctggaagatcaccccctgctgcccgagtgcaacaccctgaccatgcacaacgtgagttacgtgcgaggtcttccctgcagtgtgggatttacgctgattcaggaatgggtcgtgccatgggatatggttctcaccagagaggaactggtgatcctgagaaagtgcatgcacgtgtgcctgtgttgcgccaatatcgacatcatgaccagcatgatgatccacggctacgagagctgggcccttcattgccactgtagcagccctggctctctgcagtgcatcgccggcggccaggtgctggccagctggttcagaatggtggtcgacggcgccatgttcaaccagagattcatctggtatcgcgaggtggtgaactacaacatgcctaaggaagtgatgtttatgtcctctgtgttcatgagaggaagacacctgatctacctgcggctgtggtacgacggacacgtgggcagcgtggtgcccgccatgagcttcggctacagcgccctgcactgcggcatcctgaacaacattgtggtgctgtgctgctcctactgcgctgatctgagcgagatcagagtgcggtgctgtgctagacggacccggagactgatgctgagagccgtgcggatcatcgctgaagagacaacagccatgctgtactcttgtagaaccgagagaaggcggcagcagtttatccgggccctgctgcaacaccacagacctatcctgatgcacgattatgactctacccccatgtaggcgtggacttctccttcgccacctgtgaaacagccccaggtgggccagcaacctgtcgcccagcagctggacagcgacatgaacctgagcgagctgcccggcgagttcatcaacatcacagatgagcggctggctagacaggagacagtgtggaatatcacccctaagaacatgagcgtgacccacgacatgatgctgttcaaggcctctagaggcgaacggaccgtgtactccgtgtgctgggaaggcggcggaagactgaacaccagagtgctgtga

SEQ ID NO: 118 - DNA, 9825 bp, synthetic construct
  source 1..9825: mol_type = other DNA
atgccggggttttacgagattgtgattaaggtccccagcgaccttgacgagcatctgcccggcatttctgacagctttgtgaactgggtggccgagaaggaatgggagttgccgccagattctgacatggatctgaatctgattgagcaggcacccctgaccgtggccgagaagctgcagcgcgactttctgacggaatggcgccgtgtgagtaaggccccggaggctcttttctttgtgcaatttgagaagggagagagctacttccacatgcacgtgctcgtggaaaccaccggggtgaaatccatggttttgggacgtttcctgagtcagattcgcgaaaaactgattcagagaatttaccgcgggatcgagccgactttgccaaactggttcgcggtcacaaagaccagaaatggcgccggaggcgggaacaaggtggtggatgagtgctacatccccaattacttgctccccaaaacccagcctgagctccagtgggcgtggactaatatggaacagtatttaagcgcctgtttgaatctcacggagcgtaaacggttggtggcgcagcatctgacgcacgtgtcgcagacgcaggagcagaacaaagagaatcagaatcccaattctgatgcgccggtgatcagatcaaaaacttcagccaggtacatggagctggtcgggtggctcgtggacaaggggattacctcggagaagcagtggatccaggaggaccaggcctcatacatctccttcaatgcggcctccaactcgcggtcccaaatcaaggctgccttggacaatgcgggaaagattatgagcctgactaaaaccgcccccgactacctggtgggccagcagcccgtggaggacatttccagcaatcggatttataaaattttggaactaaacgggtacgatccccaatatgcggcttccgtctttctgggatgggccacgaaaaagttcggcaagaggaacaccatctggctgtttgggcctgcaactaccgggaagaccaacatcgcggaggccatagcccacactgtgcccttctacgggtgcgtaaactggaccaatgagaactttcccttcaacgactgtgtcgacaagatggtgatctggtgggaggaggggaagatgaccgccaaggtcgtggagtcggccaaagccattctcggaggaagcaaggtgcgcgtggaccagaaatgcaagtcctcggcccagatagacccgactcccgtgatcgtcacctccaacaccaacatgtgcgccgtgattgacgggaactcaacgaccttcgaacaccagcagccgttgcaagaccggatgttcaaatttgaactcacccgccgtctggatcatgactttgggaaggtcaccaagcaggaagtcaaagactttttccggtgggcaaaggatcacgtggttgaggtggagcatgaattctacgtcaaaaagggtggagccaagaaaagacccgcccccagtgacgcagatataagtgagcccaaacgggtgcgcgagtcagttgcgcagccatcgacgtcagacgcggaagcttcgatcaactacgcagacaggtaccaaaacaaatgttctcgtcacgtgggcatgaatctgatgctgtttccctgcagacaatgcgagagaatgaatcagaattcaaatatctgcttcactcacggacagaaagactgtttagagtgctttcccgtgtcagaatctcaacccgtttctgtcgtcaaaaaggcgtatcagaaactgtgctacattcatcatatcatgggaaaggtgccagacgcttgcactgcctgcgatctggtcaatgtggatttggatgactgcatctttgaacaataaatgatttaaatcaggtatggctgccgatggttatcttccagattggctcgaggacaacctctctgagggcattcgcgagtggtgggcgctgaaacctggagccccgaagcccaaagccaaccagcaaaagcaggacgacggccggggtctggtgcttcctggctacaagtacctcggacccttcaacggactcgacaagggggagcccgtcaacgcggcggacgcagcggccctcgagcacgacaaggcctacgaccagcagctgcaggcgggtgacaatccgtacctgcggtataaccacgccgacgccgagtttcaggagcgtctgcaagaagatacgtcttttgggggcaacctcgggcgagcagtcttccaggccaagaagcgggttctcgaacctctcggtctggttgaggaaggcgctaagacggctcctggaaagaagagaccggtagagccatcaccccagcgttctccagactcctctacgggcatcggcaagaaaggccaacagcccgccagaaaaagactcaattttggtcagactggcgactcagagtcagttccagaccctcaacctctcggagaacctccagcagcgccctctggtgtgggacctaatacaatggctgcaggcggtggcgcaccaatggcagacaataacgaaggcgccgacggagtgggtagttcctcgggaaattggcattgcgattccacatggctgggcgacagagtcatcaccaccagcacccgaacctgggccctgcccacctacaacaaccacctctacaagcaaatctccaacgggacatcgggaggagccaccaacgacaacacctacttcggctacagcaccccctgggggtattttgactttaacagattccactgccacttttcaccacgtgactggcagcgactcatcaacaacaactggggattccggcccaagagactcagcttcaagctcttcaacatccaggtcaaggaggtcacgcagaatgaaggcaccaagaccatcgccaataacctcaccagcaccatccaggtgtttacggactcggagtaccagctgccgtacgttctcggctctgcccaccagggctgcctgcctccgttcccggcggacgtgttcatgattccccagtacggctacctaacactcaacaacggtagtcaggccgtgggacgctcctccttctactgcctggaatactttccttcgcagatgctgagaaccggcaacaacttccagtttacttacaccttcgaggacgtgcctttccacagcagctacgcccacagccagagcttggaccggctgatgaatcctctgattgaccagtacctgtactacttgtctcggactcaaacaacaggaggcacggcaaatacgcagactctgggcttcagccaaggtgggcctaatacaatggccaatcaggcaaagaactggctgccaggaccctgttaccgccaacaacgcgtctcaacgacaaccgggcaaaacaacaatagcaactttgcctggactgctgggaccaaataccatctgaatggaagaaattcattggctaatcctggcatcgctatggcaacacacaaagacgacgaggagcgtttttttcccagtaacgggatcctgatttttggcaaacaaaatgctgccagagacaatgcggattacagcgatgtcatgctcaccagcgaggaagaaatcaaaaccactaaccctgtggctacagaggaatacggtatcgtggcagataacttgcagcagcaaaacacggctcctcaaattggaactgtcaacagccagggggccttacccggtatggtctggcagaaccgggacgtgtacctgcagggtcccatctgggccaagattcctcacacggacggcaacttccacccgtctccgctgatgggcggctttggcctgaaacatcctccgcctcagatcctgatcaagaacacgcctgtacctgcggatcctccgaccaccttcaaccagtcaaagctgaactctttcatcacgcaatacagcaccggacaggtcagcgtggaaattgaatgggagctgcagaaggaaaacagcaagcgctggaaccccgagatccagtacacctccaactactacaaatctacaagtgtggactttgctgttaatacagaaggcgtgtactctgaaccccgccccattggcacccgttacctcacccgtaatctgtaattgcctgttaatcaataaaccggttgattcgtttcagttgaactttggtctctgcgaagggcgaattcgtttaaacctgcaggactagagccgaattctgcatcgcgatagggataacagggtaataaataatgtactagagacactttcaataaaggcaaatgcttttatttgtacactctcgggtgattatttacccccacccttgccgtctgcgccgtttaaaaatcaaaggggttctgccgcgcatcgctatgcgccactggcagggacacgttgcgatactggtgtttagtgctccacttaaactcaggcacaaccatccgcggcagctcggtgaagttttcactccacaggctgcgcaccatcaccaacgcgtttagcaggtcgggcgccgatatcttgaagtcgcagttggggcctccgccctgcgcgcgcgagttgcgatacacagggttgcagcactggaacactatcagcgccgggtggtgcacgctggccagcacgctcttgtcggagatcagatccgcgtccaggtcctccgcgttgctcagggcgaacggagtcaactttggtagctgccttcccaaaaagggcgcgtgcccaggctttgagttgcactcgcaccgtagtggcatcaaaaggtgaccgtgcccggtctgggcgttaggatacagcgcctgcataaaagccttgatctgcttaaaagccacctgagcctttgcgccttcagagaagaacatgccgcaagacttgccggaaaactgattggccggacaggccgcgtcgtgcacgcagcaccttgcgtcggtgttggagatctgcaccacatttcggccccaccggttcttcacgatcttggccttgctagactgctccttcagcgcgcgctgcccgttttcgctcgtcacatccatttcaatcacgtgctccttatttatcataatgcttccgtgtagacacttaagctcgccttcgatctcagcgcagcggtgcagccacaacgcgcagcccgtgggctcgtgatgcttgtaggtcacctctgcaaacgactgcaggtacgcctgcaggaatcgccccatcatcgtcacaaaggtcttgttgctggtgaaggtcagctgcaacccgcggtgctcctcgttcagccaggtcttgcatacggccgccagagcttccacttggtcaggcagtagtttgaagttcgcctttagatcgttatccacgtggtacttgtccatcagcgcgcgcgcagcctccatgcccttctcccacgcagacacgatcggcacactcagcgggttcatcaccgtaatttcactttccgcttcgctgggctcttcctcttcctcttgcgtccgcataccacgcgccactgggtcgtcttcattcagccgccgcactgtgcgcttacctcctttgccatgcttgattagcaccggtgggttgctgaaacccaccatttgtagcgccacatcttctctttcttcctcgctgtccacgattacctctggtgatggcgggcgctcgggcttgggagaagggcgcttctttttcttcttgggcgcaatggccaaatccgccgccgaggtcgatggccgcgggctgggtgtgcgcggcaccagcgcgtcttgtgatgagtcttcctcgtcctcggactcgatacgccgcctcatccgcttttttgggggcgcccggggaggcggcggcgacggggacggggacgacacgtcctccatggttgggggacgtcgcgccgcaccgcgtccgcgctcgggggtggtttcgcgctgctcctcttcccgactggccatttccttctcctataggcagaaaaagatcgttgaaactcactccggggctgtggacgtcggcttaccttcgcaaatttgtacctgaggactaccacgcccacgagattaggttctacgaagaccaatcccgcccgcctaatgcggagcttaccgcctgcgtcattacccagggccacattcttggccaattgcaagccatcaacaaagcccgccaagagtttctgctacgaaagggacggggggtttacttggacccccagtccggcgaggagctcaacccaatccccccgccgccgcagccctatcagcagcagccgcgggcccttgcttcccaggatggcacccaaaaagaagctgcagctgccgccgccacccacggacgaggaggaatactgggacagtcaggcagaggaggttttggacgaggaggaggaggacatgatggaagactgggagagcctagacgaggaagcttccgaggtcgaagaggtgtcagacgaaacaccgtcaccctcggtcgcattcccctcgccggcgccccagaaatcggcaaccggttccagcatggctacaacctccgctcctcaggcgccgccggcactgcccgttcgccgacccaaccgtagatgggacaccactggaaccagggccggtaagtccaagcagccgccgccgttagcccaagagcaacaacagcgccaaggctaccgctcatggcgcgggcacaagaacgccatagttgcttgcttgcaagactgtgggggcaacatctccttcgcccgccgctttcttctctaccatcacggcgtggccttcccccgtaacatcctgcattactaccgtcatctctacagcccatactgcaccggcggcagcggcagcaacagcagcggccacacagaagcaaaggcgaccggatagcaagactctgacaaagcccaagaaatccacagcggcggcagcagcaggaggaggagcgctgcgtctggcgcccaacgaacccgtatcgacccgcgagcttagaaacaggatttttcccactctgtatgctatatttcaacagagcaggggccaagaacaagagctgaaaataaaaaacaggtctctgcgatccctcacccgcagctgcctgtatcacaaaagcgaagatcagcttcggcgcacgctggaagacgcggaggctctcttcagtaaatactgcgcgctgactcttaaggactagtttcgcgccctttctcaaatttaagcgcgaaaactacgtcatctccagcggccacacccggcgccagcacctgttgtcagcgccattttttagggcggagtaacttgtatgtgttgggaattgtagttttcttaaaatgggaagtgacgtaacgtgggaaaacggaagtgacgatttgaggaagttgtgggttttttggctttcgtttctgggcgtaggttcgcgtgcggttttctgggtgttttttgtggactttaaccgttacgtcattttttagtcctatatatactcgctctgcacttggcccttttttacactgtgactgattgagctggtgccgtgtcgagtggtgtttttttaataggttttcttttttactggtaaggctgactgttatgacaacctccggcgtgcctttcggcatgaccctgagacctaccagatctcggctgagcagacggaccccttacagccgggacagactgcctccattcgagacagaaacaagagccaccatcctggaagatcaccccctgctgcccgagtgcaacaccctgaccatgcacaacgtgagttacgtgcgaggtcttccctgcagtgtgggatttacgctgattcaggaatgggtcgtgccatgggatatggttctcaccagagaggaactggtgatcctgagaaagtgcatgcacgtgtgcctgtgttgcgccaatatcgacatcatgaccagcatgatgatccacggctacgagagctgggcccttcattgccactgtagcagccctggctctctgcagtgcatcgccggcggccaggtgctggccagctggttcagaatggtggtcgacggcgccatgttcaaccagagattcatctggtatcgcgaggtggtgaactacaacatgcctaaggaagtgatgtttatgtcctctgtgttcatgagaggaagacacctgatctacctgcggctgtggtacgacggacacgtgggcagcgtggtgcccgccatgagcttcggctacagcgccctgcactgcggcatcctgaacaacattgtggtgctgtgctgctcctactgcgctgatctgagcgagatcagagtgcggtgctgtgctagacggacccggagactgatgctgagagccgtgcggatcatcgctgaagagacaacagccatgctgtactcttgtagaaccgagagaaggcggcagcagtttatccgggccctgctgcaacaccacagacctatcctgatgcacgattatgactctacccccatgtaggcgtggacttctccttcgccacctgtgaaacagccccaggtgggccagcaacctgtcgcccagcagctggacagcgacatgaacctgagcgagctgcccggcgagttcatcaacatcacagatgagcggctggctagacaggagacagtgtggaatatcacccctaagaacatgagcgtgacccacgacatgatgctgttcaaggcctctagaggcgaacggaccgtgtactccgtgtgctgggaaggcggcggaagactgaacaccagagtgctgtgagtttgattaaggtacggtgatctgtataagctatgtggtggtggggctatactactgaatgaaaaatgacttgaaattttctgcaattgaaaaataaacacgttgaaacataacacaaacgattctttattcttgggcaatgtatgaaaaagtgtaagaggatgtggcaaatatttcattaatgtagttgtggccagaccagtcccatgaaaatgacatagagtatgcacttggagttgtgtctcctgtttcctgtgtaccgtttagtgtaatggttagtgttacaggtttagttttgtctccgtttaagtaaacttgactgacaatgttacttttggcagttttaccgtgagattttggataagctgataggttaggcataaatccaacagcgtttgtataggctgtcgcccctcctgacgcggtaggaggaggggagggtgccctgcatgtctgccgctgctcttgctcttgccgctgctgaggaggggggcgcatctgccgcagcaccggatgcatctgggaaaagcaaaaaaggggctcgtccctgtttccggaggaatttgcaagcggggtcttgcatgacggggaggcaaacccccgttcgccgcagtccggccggtccgagactcgaaccgggggtcccgcgactcaacccttggaaaataaccctccggctacagggagcgagccacttaatgctttcgctttccagcctaaccgcttacgctgcgcgcggccagtggccaaaaaagctagcgcagcagccgccgcgcctggaaggaagccaaaaggagcactcccccgttgtctgacgtcgcacacctgggttcgacacgcgggcggtaaccgcatggatcacggcggacggccggatacggggctcgaaccccggtcgtccgccatgatacccttgcgaatttatccaccagaccacggaagagtgcccgcttacaggctctccttttgcacggtctagagcgtcaacgattgcgcgcgcctgaccggccagagcgtcccgaccatggagcactttttgccgctgcgcaacatctggaaccgcgtccgcgactttccgcgcgcctccaccaccgccgccggcatcacctggatgtccaggtacatctacggata

SEQ ID NO: 119 - DNA, 12588 bp, synthetic construct
  source 1..12588: mol_type = other DNA
tcgcgcgtttcggtgatgacggtgaaaacctctgacacatgcagctcccggagacggtcacagcttgtctgtaagcggatgccgggagcagacaagcccgtcagggcgcgtcagcgggtgttggcgggtgtcggggctggcttaactatgcggcatcagagcagattgtactgagagtgcaccatatgcggtgtgaaataccgcacagatgcgtaaggagaaaataccgcatcaggcgccattcgccattcaggctgcgcaactgttgggaagggcgatcggtgcgggcctcttcgctattacgccagctggcgaaagggggatgtgctgcaaggcgattaagttgggtaacgccagggttttcccagtcacgacgttgtaaaacgacggccagagaattccgcagggtctccattttgaagcgggaggtttgaacgcgcagccgccatgccggggttttacgagattgtgattaaggtccccagcgaccttgacgagcatctgcccggcatttctgacagctttgtgaactgggtggccgagaaggaatgggagttgccgccagattctgacatggatctgaatctgattgagcaggcacccctgaccgtggccgagaagctgcagcgcgactttctgacggaatggcgccgtgtgagtaaggccccggaggctcttttctttgtgcaatttgagaagggagagagctacttccacatgcacgtgctcgtggaaaccaccggggtgaaatccatggttttgggacgtttcctgagtcagattcgcgaaaaactgattcagagaatttaccgcgggatcgagccgactttgccaaactggttcgcggtcacaaagaccagaaatggcgccggaggcgggaacaaggtggtggatgagtgctacatccccaattacttgctccccaaaacccagcctgagctccagtgggcgtggactaatatggaacagtatttaagcgcctgtttgaatctcacggagcgtaaacggttggtggcgcagcatctgacgcacgtgtcgcagacgcaggagcagaacaaagagaatcagaatcccaattctgatgcgccggtgatcagatcaaaaacttcagccaggtacatggagctggtcgggtggctcgtggacaaggggattacctcggagaagcagtggatccaggaggaccaggcctcatacatctccttcaatgcggcctccaactcgcggtcccaaatcaaggctgccttggacaatgcgggaaagattatgagcctgactaaaaccgcccccgactacctggtgggccagcagcccgtggaggacatttccagcaatcggatttataaaattttggaactaaacgggtacgatccccaatatgcggcttccgtctttctgggatgggccacgaaaaagttcggcaagaggaacaccatctggctgtttgggcctgcaactaccgggaagaccaacatcgcggaggccatagcccacactgtgcccttctacgggtgcgtaaactggaccaatgagaactttcccttcaacgactgtgtcgacaagatggtgatctggtgggaggaggggaagatgaccgccaaggtcgtggagtcggccaaagccattctcggaggaagcaaggtgcgcgtggaccagaaatgcaagtcctcggcccagatagacccgactcccgtgatcgtcacctccaacaccaacatgtgcgccgtgattgacgggaactcaacgaccttcgaacaccagcagccgttgcaagaccggatgttcaaatttgaactcacccgccgtctggatcatgactttgggaaggtcaccaagcaggaagtcaaagactttttccggtgggcaaaggatcacgtggttgaggtggagcatgaattctacgtcaaaaagggtggagccaagaaaagacccgcccccagtgacgcagatataagtgagcccaaacgggtgcgcgagtcagttgcgcagccatcgacgtcagacgcggaagcttcgatcaactacgcagacaggtaccaaaacaaatgttctcgtcacgtgggcatgaatctgatgctgtttccctgcagacaatgcgagagaatgaatcagaattcaaatatctgcttcactcacggacagaaagactgtttagagtgctttcccgtgtcagaatctcaacccgtttctgtcgtcaaaaaggcgtatcagaaactgtgctacattcatcatatcatgggaaaggtgccagacgcttgcactgcctgcgatctggtcaatgtggatttggatgactgcatctttgaacaataaatgatttaaatcaggtatggctgccgatggttatcttccagattggctcgaggacaacctctctgagggcattcgcgagtggtgggcgctgaaacctggagccccgaagcccaaagccaaccagcaaaagcaggacgacggccggggtctggtgcttcctggctacaagtacctcggacccttcaacggactcgacaagggggagcccgtcaacgcggcggacgcagcggccctcgagcacgacaaggcctacgaccagcagctgcaggcgggtgacaatccgtacctgcggtataaccacgccgacgccgagtttcaggagcgtctgcaagaagatacgtcttttgggggcaacctcgggcgagcagtcttccaggccaagaagcgggttctcgaacctctcggtctggttgaggaaggcgctaagacggctcctggaaagaagagaccggtagagccatcaccccagcgttctccagactcctctacgggcatcggcaagaaaggccaacagcccgccagaaaaagactcaattttggtcagactggcgactcagagtcagttccagaccctcaacctctcggagaacctccagcagcgccctctggtgtgggacctaatacaatggctgcaggcggtggcgcaccaatggcagacaataacgaaggcgccgacggagtgggtagttcctcgggaaattggcattgcgattccacatggctgggcgacagagtcatcaccaccagcacccgaacctgggccctgcccacctacaacaaccacctctacaagcaaatctccaacgggacatcgggaggagccaccaacgacaacacctacttcggctacagcaccccctgggggtattttgactttaacagattccactgccacttttcaccacgtgactggcagcgactcatcaacaacaactggggattccggcccaagagactcagcttcaagctcttcaacatccaggtcaaggaggtcacgcagaatgaaggcaccaagaccatcgccaataacctcaccagcaccatccaggtgtttacggactcggagtaccagctgccgtacgttctcggctctgcccaccagggctgcctgcctccgttcccggcggacgtgttcatgattccccagtacggctacctaacactcaacaacggtagtcaggccgtgggacgctcctccttctactgcctggaatactttccttcgcagatgctgagaaccggcaacaacttccagtttacttacaccttcgaggacgtgcctttccacagcagctacgcccacagccagagcttggaccggctgatgaatcctctgattgaccagtacctgtactacttgtctcggactcaaacaacaggaggcacggcaaatacgcagactctgggcttcagccaaggtgggcctaatacaatggccaatcaggcaaagaactggctgccaggaccctgttaccgccaacaacgcgtctcaacgacaaccgggcaaaacaacaatagcaactttgcctggactgctgggaccaaataccatctgaatggaagaaattcattggctaatcctggcatcgctatggcaacacacaaagacgacgaggagcgtttttttcccagtaacgggatcctgatttttggcaaacaaaatgctgccagagacaatgcggattacagcgatgtcatgctcaccagcgaggaagaaatcaaaaccactaaccctgtggctacagaggaatacggtatcgtggcagataacttgcagcagcaaaacacggctcctcaaattggaactgtcaacagccagggggccttacccggtatggtctggcagaaccgggacgtgtacctgcagggtcccatctgggccaagattcctcacacggacggcaacttccacccgtctccgctgatgggcggctttggcctgaaacatcctccgcctcagatcctgatcaagaacacgcctgtacctgcggatcctccgaccaccttcaaccagtcaaagctgaactctttcatcacgcaatacagcaccggacaggtcagcgtggaaattgaatgggagctgcagaaggaaaacagcaagcgctggaaccccgagatccagtacacctccaactactacaaatctacaagtgtggactttgctgttaatacagaaggcgtgtactctgaaccccgccccattggcacccgttacctcacccgtaatctgtaattgcctgttaatcaataaaccggttgattcgtttcagttgaactttggtctctgcgaagggcgaattcgtttaaacctgcaggactagagccgaattctgcatcgcgatagggataacagggtaataaataatgtactagagacactttcaataaaggcaaatgcttttatttgtacactctcgggtgattatttacccccacccttgccgtctgcgccgtttaaaaatcaaaggggttctgccgcgcatcgctatgcgccactggcagggacacgttgcgatactggtgtttagtgctccacttaaactcaggcacaaccatccgcggcagctcggtgaagttttcactccacaggctgcgcaccatcaccaacgcgtttagcaggtcgggcgccgatatcttgaagtcgcagttggggcctccgccctgcgcgcgcgagttgcgatacacagggttgcagcactggaacactatcagcgccgggtggtgcacgctggccagcacgctcttgtcggagatcagatccgcgtccaggtcctccgcgttgctcagggcgaacggagtcaactttggtagctgccttcccaaaaagggcgcgtgcccaggctttgagttgcactcgcaccgtagtggcatcaaaaggtgaccgtgcccggtctgggcgttaggatacagcgcctgcataaaagccttgatctgcttaaaagccacctgagcctttgcgccttcagagaagaacatgccgcaagacttgccggaaaactgattggccggacaggccgcgtcgtgcacgcagcaccttgcgtcggtgttggagatctgcaccacatttcggccccaccggttcttcacgatcttggccttgctagactgctccttcagcgcgcgctgcccgttttcgctcgtcacatccatttcaatcacgtgctccttatttatcataatgcttccgtgtagacacttaagctcgccttcgatctcagcgcagcggtgcagccacaacgcgcagcccgtgggctcgtgatgcttgtaggtcacctctgcaaacgactgcaggtacgcctgcaggaatcgccccatcatcgtcacaaaggtcttgttgctggtgaaggtcagctgcaacccgcggtgctcctcgttcagccaggtcttgcatacggccgccagagcttccacttggtcaggcagtagtttgaagttcgcctttagatcgttatccacgtggtacttgtccatcagcgcgcgcgcagcctccatgcccttctcccacgcagacacgatcggcacactcagcgggttcatcaccgtaatttcactttccgcttcgctgggctcttcctcttcctcttgcgtccgcataccacgcgccactgggtcgtcttcattcagccgccgcactgtgcgcttacctcctttgccatgcttgattagcaccggtgggttgctgaaacccaccatttgtagcgccacatcttctctttcttcctcgctgtccacgattacctctggtgatggcgggcgctcgggcttgggagaagggcgcttctttttcttcttgggcgcaatggccaaatccgccgccgaggtcgatggccgcgggctgggtgtgcgcggcaccagcgcgtcttgtgatgagtcttcctcgtcctcggactcgatacgccgcctcatccgcttttttgggggcgcccggggaggcggcggcgacggggacggggacgacacgtcctccatggttgggggacgtcgcgccgcaccgcgtccgcgctcgggggtggtttcgcgctgctcctcttcccgactggccatttccttctcctataggcagaaaaagatcgttgaaactcactccggggctgtggacgtcggcttaccttcgcaaatttgtacctgaggactaccacgcccacgagattaggttctacgaagaccaatcccgcccgcctaatgcggagcttaccgcctgcgtcattacccagggccacattcttggccaattgcaagccatcaacaaagcccgccaagagtttctgctacgaaagggacggggggtttacttggacccccagtccggcgaggagctcaacccaatccccccgccgccgcagccctatcagcagcagccgcgggcccttgcttcccaggatggcacccaaaaagaagctgcagctgccgccgccacccacggacgaggaggaatactgggacagtcaggcagaggaggttttggacgaggaggaggaggacatgatggaagactgggagagcctagacgaggaagcttccgaggtcgaagaggtgtcagacgaaacaccgtcaccctcggtcgcattcccctcgccggcgccccagaaatcggcaaccggttccagcatggctacaacctccgctcctcaggcgccgccggcactgcccgttcgccgacccaaccgtagatgggacaccactggaaccagggccggtaagtccaagcagccgccgccgttagcccaagagcaacaacagcgccaaggctaccgctcatggcgcgggcacaagaacgccatagttgcttgcttgcaagactgtgggggcaacatctccttcgcccgccgctttcttctctaccatcacggcgtggccttcccccgtaacatcctgcattactaccgtcatctctacagcccatactgcaccggcggcagcggcagcaacagcagcggccacacagaagcaaaggcgaccggatagcaagactctgacaaagcccaagaaatccacagcggcggcagcagcaggaggaggagcgctgcgtctggcgcccaacgaacccgtatcgacccgcgagcttagaaacaggatttttcccactctgtatgctatatttcaacagagcaggggccaagaacaagagctgaaaataaaaaacaggtctctgcgatccctcacccgcagctgcctgtatcacaaaagcgaagatcagcttcggcgcacgctggaagacgcggaggctctcttcagtaaatactgcgcgctgactcttaaggactagtttcgcgccctttctcaaatttaagcgcgaaaactacgtcatctccagcggccacacccggcgccagcacctgttgtcagcgccattttttagggcggagtaacttgtatgtgttgggaattgtagttttcttaaaatgggaagtgacgtaacgtgggaaaacggaagtgacgatttgaggaagttgtgggttttttggctttcgtttctgggcgtaggttcgcgtgcggttttctgggtgttttttgtggactttaaccgttacgtcattttttagtcctatatatactcgctctgcacttggcccttttttacactgtgactgattgagctggtgccgtgtcgagtggtgtttttttaataggttttcttttttactggtaaggctgactgttatgacaacctccggcgtgcctttcggcatgaccctgagacctaccagatctcggctgagcagacggaccccttacagccgggacagactgcctccattcgagacagaaacaagagccaccatcctggaagatcaccccctgctgcccgagtgcaacaccctgaccatgcacaacgtgagttacgtgcgaggtcttccctgcagtgtgggatttacgctgattcaggaatgggtcgtgccatgggatatggttctcaccagagaggaactggtgatcctgagaaagtgcatgcacgtgtgcctgtgttgcgccaatatcgacatcatgaccagcatgatgatccacggctacgagagctgggcccttcattgccactgtagcagccctggctctctgcagtgcatcgccggcggccaggtgctggccagctggttcagaatggtggtcgacggcgccatgttcaaccagagattcatctggtatcgcgaggtggtgaactacaacatgcctaaggaagtgatgtttatgtcctctgtgttcatgagaggaagacacctgatctacctgcggctgtggtacgacggacacgtgggcagcgtggtgcccgccatgagcttcggctacagcgccctgcactgcggcatcctgaacaacattgtggtgctgtgctgctcctactgcgctgatctgagcgagatcagagtgcggtgctgtgctagacggacccggagactgatgctgagagccgtgcggatcatcgctgaagagacaacagccatgctgtactcttgtagaaccgagagaaggcggcagcagtttatccgggccctgctgcaacaccacagacctatcctgatgcacgattatgactctacccccatgtaggcgtggacttctccttcgccacctgtgaaacagccccaggtgggccagcaacctgtcgcccagcagctggacagcgacatgaacctgagcgagctgcccggcgagttcatcaacatcacagatgagcggctggctagacaggagacagtgtggaatatcacccctaagaacatgagcgtgacccacgacatgatgctgttcaaggcctctagaggcgaacggaccgtgtactccgtgtgctgggaaggcggcggaagactgaacaccagagtgctgtgagtttgattaaggtacggtgatctgtataagctatgtggtggtggggctatactactgaatgaaaaatgacttgaaattttctgcaattgaaaaataaacacgttgaaacataacacaaacgattctttattcttgggcaatgtatgaaaaagtgtaagaggatgtggcaaatatttcattaatgtagttgtggccagaccagtcccatgaaaatgacatagagtatgcacttggagttgtgtctcctgtttcctgtgtaccgtttagtgtaatggttagtgttacaggtttagttttgtctccgtttaagtaaacttgactgacaatgttacttttggcagttttaccgtgagattttggataagctgataggttaggcataaatccaacagcgtttgtataggctgtcgcccctcctgacgcggtaggaggaggggagggtgccctgcatgtctgccgctgctcttgctcttgccgctgctgaggaggggggcgcatctgccgcagcaccggatgcatctgggaaaagcaaaaaaggggctcgtccctgtttccggaggaatttgcaagcggggtcttgcatgacggggaggcaaacccccgttcgccgcagtccggccggtccgagactcgaaccgggggtcccgcgactcaacccttggaaaataaccctccggctacagggagcgagccacttaatgctttcgctttccagcctaaccgcttacgctgcgcgcggccagtggccaaaaaagctagcgcagcagccgccgcgcctggaaggaagccaaaaggagcactcccccgttgtctgacgtcgcacacctgggttcgacacgcgggcggtaaccgcatggatcacggcggacggccggatacggggctcgaaccccggtcgtccgccatgatacccttgcgaatttatccaccagaccacggaagagtgcccgcttacaggctctccttttgcacggtctagagcgtcaacgattgcgcgcgcctgaccggccagagcgtcccgaccatggagcactttttgccgctgcgcaacatctggaaccgcgtccgcgactttccgcgcgcctccaccaccgccgccggcatcacctggatgtccaggtacatctacggatatggcaaacagctattatgggtattatgggtgcggccgcggatcccgggcccgtcgactgcagaggcctgcatgcaagcttggtgtaatcatggtcatagctgtttcctgtgtgaaattgttatccgctcacaattccacacaacatacgagccggaaggtcctgtattagaggtcacgtgagtgttttgcgacattttgcgacaccatgtggtcacgctgggtatttaagcccgagtgagcacgcagggtctccattttgaagcgggaggtttgaacgcgcagccgccaagcataaagtgtaaagcctggggtgcctaatgagtgagctaactcacattaattgcgttgcgctcactgcccgctttccagtcgggaaacctgtcgtgccagctgcattaatgaatcggccaacgcgcggggagaggcggtttgcgtattgggcgctcttccgcttcctcgctcactgactcgctgcgctcggtcgttcggctgcggcgagcggtatcagctcactcaaaggcggtaatacggttatccacagaatcaggggataacgcaggaaagaacatgtgagcaaaaggccagcaaaaggccaggaaccgtaaaaaggccgcgttgctggcgtttttccataggctccgcccccctgacgagcatcacaaaaatcgacgctcaagtcagaggtggcgaaacccgacaggactataaagataccaggcgtttccccctggaagctccctcgtgcgctctcctgttccgaccctgccgcttaccggatacctgtccgcctttctcccttcgggaagcgtggcgctttctcatagctcacgctgtaggtatctcagttcggtgtaggtcgttcgctccaagctgggctgtgtgcacgaaccccccgttcagcccgaccgctgcgccttatccggtaactatcgtcttgagtccaacccggtaagacacgacttatcgccactggcagcagccactggtaacaggattagcagagcgaggtatgtaggcggtgctacagagttcttgaagtggtggcctaactacggctacactagaagaacagtatttggtatctgcgctctgctgaagccagttaccttcggaaaaagagttggtagctcttgatccggcaaacaaaccaccgctggtagcggtggtttttttgtttgcaagcagcagattacgcgcagaaaaaaaggatctcaagaagatcctttgatcttttctacggggtctgacgctcagtggaacgaaaactcacgttaagggattttggtcatgagattatcaaaaaggatcttcacctagatccttttaaattaaaaatgaagttttaaatcaagcccaatctgaataatgttacaaccaattaaccaattctgattagaaaaactcatcgagcatcaaatgaaactgcaatttattcatatcaggattatcaataccatatttttgaaaaagccgtttctgtaatgaaggagaaaactcaccgaggcagttccataggatggcaagatcctggtatcggtctgcgattccgactcgtccaacatcaatacaacctattaatttcccctcgtcaaaaataaggttatcaagtgagaaatcaccatgagtgacgactgaatccggtgagaatggcaaaagtttatgcatttctttccagacttgttcaacaggccagccattacgctcgtcatcaaaatcactcgcatcaaccaaaccgttattcattcgtgattgcgcctgagcgagacgaaatacgcgatcgctgttaaaaggacaattacaaacaggaatcgaatgcaaccggcgcaggaacactgccagcgcatcaacaatattttcacctgaatcaggatattcttctaatacctggaatgctgtttttccggggatcgcagtggtgagtaaccatgcatcatcaggagtacggataaaatgcttgatggtcggaagaggcataaattccgtcagccagtttagtctgaccatctcatctgtaacatcattggcaacgctacctttgccatgtttcagaaacaactctggcgcatcgggcttcccatacaagcgatagattgtcgcacctgattgcccgacattatcgcgagcccatttatacccatataaatcagcatccatgttggaatttaatcgcggcctcgacgtttcccgttgaatatggctcataacaccccttgtattactgtttatgtaagcagacagttttattgttcatgatgatatatttttatcttgtgcaatgtaacatcagagattttgagacacgggccagagctgca

SEQ ID NO: 120 - protein, 150 aa, synthetic construct
MTTSGVPFGMTLRPTRSRLSRRTPYSRDRLPPFETETRATILEDHPLLPECNTLTMHNAWTSPSPPVKQPQVGQQPVAQQLDSDMNLSELPGEFINITDERLARQETVWNITPKNMSVTHDMMLFKASRGERTVYSVCWEGGGRLNTRVL

SEQ ID NO: 121 - DNA, 598 bp, synthetic construct
  source 1..598: mol_type = other DNA
gttcatagcccatatatggagttccgcgttacataacttacggtaaatggcccgcctggctgaccgcccaacgacccccgcccattgacgtcaataatgacgtatgttcccatagtaacgccaatagggactttccattgacgtcaatgggtggagtatttacggtaaactgcccacttggcagtacatcaagtgtatcatatgccaagtacgccccctattgacgtcaatgacggtaaatggcccgcctggcattatgcccagtacatgaccttatgggactttcctacttggcagtacatctacgtattagtcatcgctattaccatggtgatgcggttttggcagtacatcaatgggcgtggatagcggtttgactcacggggatttccaagtctccaccccattgacgtcaatgggagtttgttttggcaccaaaatcaacgggactttccaaaatgtcgtaacaactccgccccattgacgcaaatgggcggtaggcgtgtacggtgggaggtctatataagcagagctcgtttagtgaaccgtcagatcgcctggagacgccatccacgctgttttgacctccatagaagac

SEQ ID NO: 122 - DNA, 7052 bp, synthetic construct
  source 1..7052: mol_type = other DNA
ttaaaaatcaaaggggttctgccgcgcatcgctatgcgccactggcagggacacgttgcgatactggtgtttagtgctccacttaaactcaggcacaaccatccgcggcagctcggtgaagttttcactccacaggctgcgcaccatcaccaacgcgtttagcaggtcgggcgccgatatcttgaagtcgcagttggggcctccgccctgcgcgcgcgagttgcgatacacagggttgcagcactggaacactatcagcgccgggtggtgcacgctggccagcacgctcttgtcggagatcagatccgcgtccaggtcctccgcgttgctcagggcgaacggagtcaactttggtagctgccttcccaaaaagggcgcgtgcccaggctttgagttgcactcgcaccgtagtggcatcaaaaggtgaccgtgcccggtctgggcgttaggatacagcgcctgcataaaagccttgatctgcttaaaagccacctgagcctttgcgccttcagagaagaacatgccgcaagacttgccggaaaactgattggccggacaggccgcgtcgtgcacgcagcaccttgcgtcggtgttggagatctgcaccacatttcggccccaccggttcttcacgatcttggccttgctagactgctccttcagcgcgcgctgcccgttttcgctcgtcacatccatttcaatcacgtgctccttatttatcataatgcttccgtgtagacacttaagctcgccttcgatctcagcgcagcggtgcagccacaacgcgcagcccgtgggctcgtgatgcttgtaggtcacctctgcaaacgactgcaggtacgcctgcaggaatcgccccatcatcgtcacaaaggtcttgttgctggtgaaggtcagctgcaacccgcggtgctcctcgttcagccaggtcttgcatacggccgccagagcttccacttggtcaggcagtagtttgaagttcgcctttagatcgttatccacgtggtacttgtccatcagcgcgcgcgcagcctccatgcccttctcccacgcagacacgatcggcacactcagcgggttcatcaccgtaatttcactttccgcttcgctgggctcttcctcttcctcttgcgtccgcataccacgcgccactgggtcgtcttcattcagccgccgcactgtgcgcttacctcctttgccatgcttgattagcaccggtgggttgctgaaacccaccatttgtagcgccacatcttctctttcttcctcgctgtccacgattacctctggtgatggcgggcgctcgggcttgggagaagggcgcttctttttcttcttgggcgcaatggccaaatccgccgccgaggtcgatggccgcgggctgggtgtgcgcggcaccagcgcgtcttgtgatgagtcttcctcgtcctcggactcgatacgccgcctcatccgcttttttgggggcgcccggggaggcggcggcgacggggacggggacgacacgtcctccatggttgggggacgtcgcgccgcaccgcgtccgcgctcgggggtggtttcgcgctgctcctcttcccgactggccatttccttctcctataggcagaaaaagatcatggagtcagtcgagaagaaggacagcctaaccgccccctctgagttcgccaccaccgcctccaccgatgccgccaacgcgcctaccaccttccccgtcgaggcacccccgcttgaggaggaggaagtgattatcgagcaggacccaggttttgtaagcgaagacgacgaggaccgctcagtaccaacagaggataaaaagcaagaccaggacaacgcagaggcaaacgaggaacaagtcgggcggggggacgaaaggcatggcgactacctagatgtgggagacgacgtgctgttgaagcatctgcagcgccagtgcgccattatctgcgacgcgttgcaagagcgcagcgatgtgcccctcgccatagcggatgtcagccttgcctacgaacgccacctattctcaccgcgcgtaccccccaaacgccaagaaaacggcacatgcgagcccaacccgcgcctcaacttctaccccgtatttgccgtgccagaggtgcttgccacctatcacatctttttccaaaactgcaagatacccctatcctgccgtgccaaccgcagccgagcggacaagcagctggccttgcggcagggcgctgtcatacctgatatcgcctcgctcaacgaagtgccaaaaatctttgagggtcttggacgcgacgagaagcgcgcggcaaacgctctgcaacaggaaaacagcgaaaatgaaagtcactctggagtgttggtggaactcgagggtgacaacgcgcgcctagccgtactaaaacgcagcatcgaggtcacccactttgcctacccggcacttaacctaccccccaaggtcatgagcacagtcatgagtgagctgatcgtgcgccgtgcgcagcccctggagagggatgcaaatttgcaagaacaaacagaggagggcctacccgcagttggcgacgagcagctagcgcgctggcttcaaacgcgcgagcctgccgacttggaggagcgacgcaaactaatgatggccgcagtgctcgttaccgtggagcttgagtgcatgcagcggttctttgctgacccggagatgcagcgcaagctagaggaaacattgcactacacctttcgacagggctacgtacgccaggcctgcaagatctccaacgtggagctctgcaacctggtctcctaccttggaattttgcacgaaaaccgccttgggcaaaacgtgcttcattccacgctcaagggcgaggcgcgccgcgactacgtccgcgactgcgtttacttatttctatgctacacctggcagacggccatgggcgtttggcagcagtgcttggaggagtgcaacctcaaggagctgcagaaactgctaaagcaaaacttgaaggacctatggacggccttcaacgagcgctccgtggccgcgcacctggcggacatcattttccccgaacgcctgcttaaaaccctgcaacagggtctgccagacttcaccagtcaaagcatgttgcagaactttaggaactttatcctagagcgctcaggaatcttgcccgccacctgctgtgcacttcctagcgactttgtgcccattaagtaccgcgaatgccctccgccgctttggggccactgctaccttctgcagctagccaactaccttgcctaccactctgacataatggaagacgtgagcggtgacggtctactggagtgtcactgtcgctgcaacctatgcaccccgcaccgctccctggtttgcaattcgcagctgcttaacgaaagtcaaattatcggtacctttgagctgcagggtccctcgcctgacgaaaagtccgcggctccggggttgaaactcactccggggctgtggacgtcggcttaccttcgcaaatttgtacctgaggactaccacgcccacgagattaggttctacgaagaccaatcccgcccgcctaatgcggagcttaccgcctgcgtcattacccagggccacattcttggccaattgcaagccatcaacaaagcccgccaagagtttctgctacgaaagggacggggggtttacttggacccccagtccggcgaggagctcaacccaatccccccgccgccgcagccctatcagcagcagccgcgggcccttgcttcccaggatggcacccaaaaagaagctgcagctgccgccgccacccacggacgaggaggaatactgggacagtcaggcagaggaggttttggacgaggaggaggaggacatgatggaagactgggagagcctagacgaggaagcttccgaggtcgaagaggtgtcagacgaaacaccgtcaccctcggtcgcattcccctcgccggcgccccagaaatcggcaaccggttccagcatggctacaacctccgctcctcaggcgccgccggcactgcccgttcgccgacccaaccgtagatgggacaccactggaaccagggccggtaagtccaagcagccgccgccgttagcccaagagcaacaacagcgccaaggctaccgctcatggcgcgggcacaagaacgccatagttgcttgcttgcaagactgtgggggcaacatctccttcgcccgccgctttcttctctaccatcacggcgtggccttcccccgtaacatcctgcattactaccgtcatctctacagcccatactgcaccggcggcagcggcagcaacagcagcggccacacagaagcaaaggcgaccggatagcaagactctgacaaagcccaagaaatccacagcggcggcagcagcaggaggaggagcgctgcgtctggcgcccaacgaacccgtatcgacccgcgagcttagaaacaggatttttcccactctgtatgctatatttcaacagagcaggggccaagaacaagagctgaaaataaaaaacaggtctctgcgatccctcacccgcagctgcctgtatcacaaaagcgaagatcagcttcggcgcacgctggaagacgcggaggctctcttcagtaaatactgcgcgctgactcttaaggactagtttcgcgccctttctcaaatttaagcgcgaaaactacgtcatctccagcggccacacccggcgccagcacctgttgtcagcgccattttttagggcggagtaacttgtatgtgttgggaattgtagttttcttaaaatgggaagtgacgtaacgtgggaaaacggaagtgacgatttgaggaagttgtgggttttttggctttcgtttctgggcgtaggttcgcgtgcggttttctgggtgttttttgtggactttaaccgttacgtcattttttagtcctatatatactcgctctgcacttggcccttttttacactgtgactgattgagctggtgccgtgtcgagtggtgtttttttaataggttttcttttttactggtaaggctgactgttatgactacgtccggcgttccatttggcatgacactacgaccaacacgatctcggttgtctcggcgcactccgtacagtagggatcgtctacctccttttgagacagaaacccgcgctaccatactggaggatcatccgctgctgcccgaatgtaacactttgacaatgcacaacgtgagttacgtgcgaggtcttccctgcagtgtgggatttacgctgattcaggaatgggttgttccctgggatatggttctaacgcgggaggagcttgtaatcctgaggaagtgtatgcacgtgtgcctgtgttgtgccaacattgatatcatgacgagcatgatgatccatggttacgagtcctgggctctccactgtcattgttccagtcccggttccctgcagtgtatagccggcgggcaggttttggccagctggtttaggatggtggtggatggcgccatgtttaatcagaggtttatatggtaccgggaggtggtgaattacaacatgccaaaagaggtaatgtttatgtccagcgtgtttatgaggggtcgccacttaatctacctgcgcttgtggtatgatggccacgtgggttctgtggtccccgccatgagctttggatacagcgccttgcactgtgggattttgaacaatattgtggtgctgtgctgcagttactgtgctgatttaagtgagatcagggtgcgctgctgtgcccggaggacaaggcgccttatgctgcgggcggtgcgaatcatcgctgaggagaccactgccatgttgtattcctgcaggacggagcggcggcggcagcagtttattcgcgcgctgctgcagcaccaccgccctatcctgatgcacgattatgactctacccccatgtaggtttgattaaggtacggtgatctgtataagctatgtggtggtggggctatactactgaatgaaaaatgacttgaaattttctgcaattgaaaaataaacacgttgaaacataacacaaacgattctttattcttgggcaatgtatgaaaaagtgtaagaggatgtggcaaatatttcattaatgtagttgtggccagaccagtcccatgaaaatgacatagagtatgcacttggagttgtgtctcctgtttcctgtgtaccgtttagtgtaatggttagtgttacaggtttagttttgtctccgtttaagtaaacttgactgacaatgttacttttggcagttttaccgtgagattttggataagctgataggttaggcataaatccaacagcgtttgtataggctgtcgcccctcctgacgcggtaggaggaggggagggtgccctgcatgtctgccgctgctcttgctcttgccgctgctgaggaggggggcgcatctgccgcagcaccggatgcatctgggaaaagcaaaaaaggggctcgtccctgtttccggaggaatttgcaagcggggtcttgcatgacggggaggcaaacccccgttcgccgcagtccggccggtccgagactcgaaccgggggtcccgcgactcaacccttggaaaataaccctccggctacagggagcgagccacttaatgctttcgctttccagcctaaccgcttacgctgcgcgcggccagtggccaaaaaagctagcgcagcagccgccgcgcctggaaggaagccaaaaggagcactcccccgttgtctgacgtcgcacacctgggttcgacacgcgggcggtaaccgcatggatcacggcggacggccggatacggggctcgaaccccggtcgtccgccatgatacccttgcgaatttatccaccagaccacggaagagtgcccgcttacaggctctccttttgcacggtctagagcgtcaacgattgcgcgcgcctgaccggccagagcgtcccgaccatggagcactttttgccgctgcgcaacatctggaaccgcgtccgcgactttccgcgcgcctccaccaccgccgccggcatcacctggatgtccaggtacatctacggata

SEQ ID NO: 123 - DNA, 7123 bp, synthetic construct
  source 1..7123: mol_type = other DNA
aataaaggcaaatgcttttatttgtacactctcgggtgattatttacccccacccttgccgtctgcgccgtttaaaaatcaaaggggttctgccgcgcatcgctatgcgccactggcagggacacgttgcgatactggtgtttagtgctccacttaaactcaggcacaaccatccgcggcagctcggtgaagttttcactccacaggctgcgcaccatcaccaacgcgtttagcaggtcgggcgccgatatcttgaagtcgcagttggggcctccgccctgcgcgcgcgagttgcgatacacagggttgcagcactggaacactatcagcgccgggtggtgcacgctggccagcacgctcttgtcggagatcagatccgcgtccaggtcctccgcgttgctcagggcgaacggagtcaactttggtagctgccttcccaaaaagggcgcgtgcccaggctttgagttgcactcgcaccgtagtggcatcaaaaggtgaccgtgcccggtctgggcgttaggatacagcgcctgcataaaagccttgatctgcttaaaagccacctgagcctttgcgccttcagagaagaacatgccgcaagacttgccggaaaactgattggccggacaggccgcgtcgtgcacgcagcaccttgcgtcggtgttggagatctgcaccacatttcggccccaccggttcttcacgatcttggccttgctagactgctccttcagcgcgcgctgcccgttttcgctcgtcacatccatttcaatcacgtgctccttatttatcataatgcttccgtgtagacacttaagctcgccttcgatctcagcgcagcggtgcagccacaacgcgcagcccgtgggctcgtgatgcttgtaggtcacctctgcaaacgactgcaggtacgcctgcaggaatcgccccatcatcgtcacaaaggtcttgttgctggtgaaggtcagctgcaacccgcggtgctcctcgttcagccaggtcttgcatacggccgccagagcttccacttggtcaggcagtagtttgaagttcgcctttagatcgttatccacgtggtacttgtccatcagcgcgcgcgcagcctccatgcccttctcccacgcagacacgatcggcacactcagcgggttcatcaccgtaatttcactttccgcttcgctgggctcttcctcttcctcttgcgtccgcataccacgcgccactgggtcgtcttcattcagccgccgcactgtgcgcttacctcctttgccatgcttgattagcaccggtgggttgctgaaacccaccatttgtagcgccacatcttctctttcttcctcgctgtccacgattacctctggtgatggcgggcgctcgggcttgggagaagggcgcttctttttcttcttgggcgcaatggccaaatccgccgccgaggtcgatggccgcgggctgggtgtgcgcggcaccagcgcgtcttgtgatgagtcttcctcgtcctcggactcgatacgccgcctcatccgcttttttgggggcgcccggggaggcggcggcgacggggacggggacgacacgtcctccatggttgggggacgtcgcgccgcaccgcgtccgcgctcgggggtggtttcgcgctgctcctcttcccgactggccatttccttctcctataggcagaaaaagatcatggagtcagtcgagaagaaggacagcctaaccgccccctctgagttcgccaccaccgcctccaccgatgccgccaacgcgcctaccaccttccccgtcgaggcacccccgcttgaggaggaggaagtgattatcgagcaggacccaggttttgtaagcgaagacgacgaggaccgctcagtaccaacagaggataaaaagcaagaccaggacaacgcagaggcaaacgaggaacaagtcgggcggggggacgaaaggcatggcgactacctagatgtgggagacgacgtgctgttgaagcatctgcagcgccagtgcgccattatctgcgacgcgttgcaagagcgcagcgatgtgcccctcgccatagcggatgtcagccttgcctacgaacgccacctattctcaccgcgcgtaccccccaaacgccaagaaaacggcacatgcgagcccaacccgcgcctcaacttctaccccgtatttgccgtgccagaggtgcttgccacctatcacatctttttccaaaactgcaagatacccctatcctgccgtgccaaccgcagccgagcggacaagcagctggccttgcggcagggcgctgtcatacctgatatcgcctcgctcaacgaagtgccaaaaatctttgagggtcttggacgcgacgagaagcgcgcggcaaacgctctgcaacaggaaaacagcgaaaatgaaagtcactctggagtgttggtggaactcgagggtgacaacgcgcgcctagccgtactaaaacgcagcatcgaggtcacccactttgcctacccggcacttaacctaccccccaaggtcatgagcacagtcatgagtgagctgatcgtgcgccgtgcgcagcccctggagagggatgcaaatttgcaagaacaaacagaggagggcctacccgcagttggcgacgagcagctagcgcgctggcttcaaacgcgcgagcctgccgacttggaggagcgacgcaaactaatgatggccgcagtgctcgttaccgtggagcttgagtgcatgcagcggttctttgctgacccggagatgcagcgcaagctagaggaaacattgcactacacctttcgacagggctacgtacgccaggcctgcaagatctccaacgtggagctctgcaacctggtctcctaccttggaattttgcacgaaaaccgccttgggcaaaacgtgcttcattccacgctcaagggcgaggcgcgccgcgactacgtccgcgactgcgtttacttatttctatgctacacctggcagacggccatgggcgtttggcagcagtgcttggaggagtgcaacctcaaggagctgcagaaactgctaaagcaaaacttgaaggacctatggacggccttcaacgagcgctccgtggccgcgcacctggcggacatcattttccccgaacgcctgcttaaaaccctgcaacagggtctgccagacttcaccagtcaaagcatgttgcagaactttaggaactttatcctagagcgctcaggaatcttgcccgccacctgctgtgcacttcctagcgactttgtgcccattaagtaccgcgaatgccctccgccgctttggggccactgctaccttctgcagctagccaactaccttgcctaccactctgacataatggaagacgtgagcggtgacggtctactggagtgtcactgtcgctgcaacctatgcaccccgcaccgctccctggtttgcaattcgcagctgcttaacgaaagtcaaattatcggtacctttgagctgcagggtccctcgcctgacgaaaagtccgcggctccggggttgaaactcactccggggctgtggacgtcggcttaccttcgcaaatttgtacctgaggactaccacgcccacgagattaggttctacgaagaccaatcccgcccgcctaatgcggagcttaccgcctgcgtcattacccagggccacattcttggccaattgcaagccatcaacaaagcccgccaagagtttctgctacgaaagggacggggggtttacttggacccccagtccggcgaggagctcaacccaatccccccgccgccgcagccctatcagcagcagccgcgggcccttgcttcccaggatggcacccaaaaagaagctgcagctgccgccgccacccacggacgaggaggaatactgggacagtcaggcagaggaggttttggacgaggaggaggaggacatgatggaagactgggagagcctagacgaggaagcttccgaggtcgaagaggtgtcagacgaaacaccgtcaccctcggtcgcattcccctcgccggcgccccagaaatcggcaaccggttccagcatggctacaacctccgctcctcaggcgccgccggcactgcccgttcgccgacccaaccgtagatgggacaccactggaaccagggccggtaagtccaagcagccgccgccgttagcccaagagcaacaacagcgccaaggctaccgctcatggcgcgggcacaagaacgccatagttgcttgcttgcaagactgtgggggcaacatctccttcgcccgccgctttcttctctaccatcacggcgtggccttcccccgtaacatcctgcattactaccgtcatctctacagcccatactgcaccggcggcagcggcagcaacagcagcggccacacagaagcaaaggcgaccggatagcaagactctgacaaagcccaagaaatccacagcggcggcagcagcaggaggaggagcgctgcgtctggcgcccaacgaacccgtatcgacccgcgagcttagaaacaggatttttcccactctgtatgctatatttcaacagagcaggggccaagaacaagagctgaaaataaaaaacaggtctctgcgatccctcacccgcagctgcctgtatcacaaaagcgaagatcagcttcggcgcacgctggaagacgcggaggctctcttcagtaaatactgcgcgctgactcttaaggactagtttcgcgccctttctcaaatttaagcgcgaaaactacgtcatctccagcggccacacccggcgccagcacctgttgtcagcgccattttttagggcggagtaacttgtatgtgttgggaattgtagttttcttaaaatgggaagtgacgtaacgtgggaaaacggaagtgacgatttgaggaagttgtgggttttttggctttcgtttctgggcgtaggttcgcgtgcggttttctgggtgttttttgtggactttaaccgttacgtcattttttagtcctatatatactcgctctgcacttggcccttttttacactgtgactgattgagctggtgccgtgtcgagtggtgtttttttaataggttttcttttttactggtaaggctgactgttatgactacgtccggcgttccatttggcatgacactacgaccaacacgatctcggttgtctcggcgcactccgtacagtagggatcgtctacctccttttgagacagaaacccgcgctaccatactggaggatcatccgctgctgcccgaatgtaacactttgacaatgcacaacgtgagttacgtgcgaggtcttccctgcagtgtgggatttacgctgattcaggaatgggttgttccctgggatatggttctaacgcgggaggagcttgtaatcctgaggaagtgtatgcacgtgtgcctgtgttgtgccaacattgatatcatgacgagcatgatgatccatggttacgagtcctgggctctccactgtcattgttccagtcccggttccctgcagtgtatagccggcgggcaggttttggccagctggtttaggatggtggtggatggcgccatgtttaatcagaggtttatatggtaccgggaggtggtgaattacaacatgccaaaagaggtaatgtttatgtccagcgtgtttatgaggggtcgccacttaatctacctgcgcttgtggtatgatggccacgtgggttctgtggtccccgccatgagctttggatacagcgccttgcactgtgggattttgaacaatattgtggtgctgtgctgcagttactgtgctgatttaagtgagatcagggtgcgctgctgtgcccggaggacaaggcgccttatgctgcgggcggtgcgaatcatcgctgaggagaccactgccatgttgtattcctgcaggacggagcggcggcggcagcagtttattcgcgcgctgctgcagcaccaccgccctatcctgatgcacgattatgactctacccccatgtaggtttgattaaggtacggtgatctgtataagctatgtggtggtggggctatactactgaatgaaaaatgacttgaaattttctgcaattgaaaaataaacacgttgaaacataacacaaacgattctttattcttgggcaatgtatgaaaaagtgtaagaggatgtggcaaatatttcattaatgtagttgtggccagaccagtcccatgaaaatgacatagagtatgcacttggagttgtgtctcctgtttcctgtgtaccgtttagtgtaatggttagtgttacaggtttagttttgtctccgtttaagtaaacttgactgacaatgttacttttggcagttttaccgtgagattttggataagctgataggttaggcataaatccaacagcgtttgtataggctgtcgcccctcctgacgcggtaggaggaggggagggtgccctgcatgtctgccgctgctcttgctcttgccgctgctgaggaggggggcgcatctgccgcagcaccggatgcatctgggaaaagcaaaaaaggggctcgtccctgtttccggaggaatttgcaagcggggtcttgcatgacggggaggcaaacccccgttcgccgcagtccggccggtccgagactcgaaccgggggtcccgcgactcaacccttggaaaataaccctccggctacagggagcgagccacttaatgctttcgctttccagcctaaccgcttacgctgcgcgcggccagtggccaaaaaagctagcgcagcagccgccgcgcctggaaggaagccaaaaggagcactcccccgttgtctgacgtcgcacacctgggttcgacacgcgggcggtaaccgcatggatcacggcggacggccggatacggggctcgaaccccggtcgtccgccatgatacccttgcgaatttatccaccagaccacggaagagtgcccgcttacaggctctccttttgcacggtctagagcgtcaacgattgcgcgcgcctgaccggccagagcgtcccgaccatggagcactttttgccgctgcgcaacatctggaaccgcgtccgcgactttccgcgcgcctccaccaccgccgccggcatcacctggatgtccaggtacatctacggata

SEQ ID NO: 124 - DNA, 8365 bp, synthetic construct
  source 1..8365: mol_type = other DNA
ttaaaaatcaaaggggttctgccgcgcatcgctatgcgccactggcagggacacgttgcgatactggtgtttagtgctccacttaaactcaggcacaaccatccgcggcagctcggtgaagttttcactccacaggctgcgcaccatcaccaacgcgtttagcaggtcgggcgccgatatcttgaagtcgcagttggggcctccgccctgcgcgcgcgagttgcgatacacagggttgcagcactggaacactatcagcgccgggtggtgcacgctggccagcacgctcttgtcggagatcagatccgcgtccaggtcctccgcgttgctcagggcgaacggagtcaactttggtagctgccttcccaaaaagggcgcgtgcccaggctttgagttgcactcgcaccgtagtggcatcaaaaggtgaccgtgcccggtctgggcgttaggatacagcgcctgcataaaagccttgatctgcttaaaagccacctgagcctttgcgccttcagagaagaacatgccgcaagacttgccggaaaactgattggccggacaggccgcgtcgtgcacgcagcaccttgcgtcggtgttggagatctgcaccacatttcggccccaccggttcttcacgatcttggccttgctagactgctccttcagcgcgcgctgcccgttttcgctcgtcacatccatttcaatcacgtgctccttatttatcataatgcttccgtgtagacacttaagctcgccttcgatctcagcgcagcggtgcagccacaacgcgcagcccgtgggctcgtgatgcttgtaggtcacctctgcaaacgactgcaggtacgcctgcaggaatcgccccatcatcgtcacaaaggtcttgttgctggtgaaggtcagctgcaacccgcggtgctcctcgttcagccaggtcttgcatacggccgccagagcttccacttggtcaggcagtagtttgaagttcgcctttagatcgttatccacgtggtacttgtccatcagcgcgcgcgcagcctccatgcccttctcccacgcagacacgatcggcacactcagcgggttcatcaccgtaatttcactttccgcttcgctgggctcttcctcttcctcttgcgtccgcataccacgcgccactgggtcgtcttcattcagccgccgcactgtgcgcttacctcctttgccatgcttgattagcaccggtgggttgctgaaacccaccatttgtagcgccacatcttctctttcttcctcgctgtccacgattacctctggtgatggcgggcgctcgggcttgggagaagggcgcttctttttcttcttgggcgcaatggccaaatccgccgccgaggtcgatggccgcgggctgggtgtgcgcggcaccagcgcgtcttgtgatgagtcttcctcgtcctcggactcgatacgccgcctcatccgcttttttgggggcgcccggggaggcggcggcgacggggacggggacgacacgtcctccatggttgggggacgtcgcgccgcaccgcgtccgcgctcgggggtggtttcgcgctgctcctcttcccgactggccatttccttctcctataggcagaaaaagatcatggagtcagtcgagaagaaggacagcctaaccgccccctctgagttcgccaccaccgcctccaccgatgccgccaacgcgcctaccaccttccccgtcgaggcacccccgcttgaggaggaggaagtgattatcgagcaggacccaggttttgtaagcgaagacgacgaggaccgctcagtaccaacagaggataaaaagcaagaccaggacaacgcagaggcaaacgaggaacaagtcgggcggggggacgaaaggcatggcgactacctagatgtgggagacgacgtgctgttgaagcatctgcagcgccagtgcgccattatctgcgacgcgttgcaagagcgcagcgatgtgcccctcgccatagcggatgtcagccttgcctacgaacgccacctattctcaccgcgcgtaccccccaaacgccaagaaaacggcacatgcgagcccaacccgcgcctcaacttctaccccgtatttgccgtgccagaggtgcttgccacctatcacatctttttccaaaactgcaagatacccctatcctgccgtgccaaccgcagccgagcggacaagcagctggccttgcggcagggcgctgtcatacctgatatcgcctcgctcaacgaagtgccaaaaatctttgagggtcttggacgcgacgagaagcgcgcggcaaacgctctgcaacaggaaaacagcgaaaatgaaagtcactctggagtgttggtggaactcgagggtgacaacgcgcgcctagccgtactaaaacgcagcatcgaggtcacccactttgcctacccggcacttaacctaccccccaaggtcatgagcacagtcatgagtgagctgatcgtgcgccgtgcgcagcccctggagagggatgcaaatttgcaagaacaaacagaggagggcctacccgcagttggcgacgagcagctagcgcgctggcttcaaacgcgcgagcctgccgacttggaggagcgacgcaaactaatgatggccgcagtgctcgttaccgtggagcttgagtgcatgcagcggttctttgctgacccggagatgcagcgcaagctagaggaaacattgcactacacctttcgacagggctacgtacgccaggcctgcaagatctccaacgtggagctctgcaacctggtctcctaccttggaattttgcacgaaaaccgccttgggcaaaacgtgcttcattccacgctcaagggcgaggcgcgccgcgactacgtccgcgactgcgtttacttatttctatgctacacctggcagacggccatgggcgtttggcagcagtgcttggaggagtgcaacctcaaggagctgcagaaactgctaaagcaaaacttgaaggacctatggacggccttcaacgagcgctccgtggccgcgcacctggcggacatcattttccccgaacgcctgcttaaaaccctgcaacagggtctgccagacttcaccagtcaaagcatgttgcagaactttaggaactttatcctagagcgctcaggaatcttgcccgccacctgctgtgcacttcctagcgactttgtgcccattaagtaccgcgaatgccctccgccgctttggggccactgctaccttctgcagctagccaactaccttgcctaccactctgacataatggaagacgtgagcggtgacggtctactggagtgtcactgtcgctgcaacctatgcaccccgcaccgctccctggtttgcaattcgcagctgcttaacgaaagtcaaattatcggtacctttgagctgcagggtccctcgcctgacgaaaagtccgcggctccggggttgaaactcactccggggctgtggacgtcggcttaccttcgcaaatttgtacctgaggactaccacgcccacgagattaggttctacgaagaccaatcccgcccgcctaatgcggagcttaccgcctgcgtcattacccagggccacattcttggccaattgcaagccatcaacaaagcccgccaagagtttctgctacgaaagggacggggggtttacttggacccccagtccggcgaggagctcaacccaatccccccgccgccgcagccctatcagcagcagccgcgggcccttgcttcccaggatggcacccaaaaagaagctgcagctgccgccgccacccacggacgaggaggaatactgggacagtcaggcagaggaggttttggacgaggaggaggaggacatgatggaagactgggagagcctagacgaggaagcttccgaggtcgaagaggtgtcagacgaaacaccgtcaccctcggtcgcattcccctcgccggcgccccagaaatcggcaaccggttccagcatggctacaacctccgctcctcaggcgccgccggcactgcccgttcgccgacccaaccgtagatgggacaccactggaaccagggccggtaagtccaagcagccgccgccgttagcccaagagcaacaacagcgccaaggctaccgctcatggcgcgggcacaagaacgccatagttgcttgcttgcaagactgtgggggcaacatctccttcgcccgccgctttcttctctaccatcacggcgtggccttcccccgtaacatcctgcattactaccgtcatctctacagcccatactgcaccggcggcagcggcagcaacagcagcggccacacagaagcaaaggcgaccggatagcaagactctgacaaagcccaagaaatccacagcggcggcagcagcaggaggaggagcgctgcgtctggcgcccaacgaacccgtatcgacccgcgagcttagaaacaggatttttcccactctgtatgctatatttcaacagagcaggggccaagaacaagagctgaaaataaaaaacaggtctctgcgatccctcacccgcagctgcctgtatcacaaaagcgaagatcagcttcggcgcacgctggaagacgcggaggctctcttcagtaaatactgcgcgctgactcttaaggactagtttcgcgccctttctcaaatttaagcgcgaaaactacgtcatctccagcggccacacccggcgccagcacctgttgtcagcgccattttttagggcggagtaacttgtatgtgttgggaattgtagttttcttaaaatgggaagtgacgtaacgtgggaaaacggaagtgacgatttgaggaagttgtgggttttttggctttcgtttctgggcgtaggttcgcgtgcggttttctgggtgttttttgtggactttaaccgttacgtcattttttagtcctatatatactcgctctgcacttggcccttttttacactgtgactgattgagctggtgccgtgtcgagtggtgtttttttaataggttttcttttttactggtaaggctgactgttatgcagaaacccgcagacatgtttgagagaaaaatggtgtctttttctgtggtggttccggagcttacctgcctttatctgcatgagcatgactacgatgtgctttcttttttgcgcgaggctttgcctgattttttgagcagcaccttgcattttatatcgccgcccatgcaacaagcttacatcggggctacgctggttagcatagctccgagtatgcgtgtcataatcagtgtgggttcttttgtcatggttcctggcggggaagtggccgcgctggtccgtgcagacctgcacgattatgttcagctggccctgcgaagggacctacgggatcgcggtatttttgttaatgttccgcttttgaatcttatacaggtctgtgaggaacctgaatttttgcaatcatgattcgctgcttgaggctgaaggtggagggcgctctggagcagatttttacaatggccggacttaatattcgggatttgcttagagatatattgagaaggtggcgagatgagaattatttgggcatggttgaaggtgctggaatgtttatagaggagattcaccctgaagggtttagcctttacgtccacttggacgtgagggccgtttgccttttggaagccattgtgcaacatcttacaaatgccattatctgttctttggctgtagagtttgaccacgccaccggaggggagcgcgttcacttaatagatcttcattttgaggttttggataatcttttggaataaaaaaaaaaaacatggttcttccagctcttcccgctcctcccgtgtgtgactcgcagaacgaatgtgtaggttggctgggtgtggcttattctgcggtggtggatgttatcagggcagcggcgcatgaaggagtttacatagaacccgaagccagggggcgcctggatgctttgagagagtggatatactacaactactacacagagcgatctaagcggcgagaccggagacgcagatctgtttgtcacgcccgcacctggttttgcttcaggaaatatgactacgtccggcgttccatttggcatgacactacgaccaacacgatctcggttgtctcggcgcactccgtacagtagggatcgtctacctccttttgagacagaaacccgcgctaccatactggaggatcatccgctgctgcccgaatgtaacactttgacaatgcacaacgtgagttacgtgcgaggtcttccctgcagtgtgggatttacgctgattcaggaatgggttgttccctgggatatggttctaacgcgggaggagcttgtaatcctgaggaagtgtatgcacgtgtgcctgtgttgtgccaacattgatatcatgacgagcatgatgatccatggttacgagtcctgggctctccactgtcattgttccagtcccggttccctgcagtgtatagccggcgggcaggttttggccagctggtttaggatggtggtggatggcgccatgtttaatcagaggtttatatggtaccgggaggtggtgaattacaacatgccaaaagaggtaatgtttatgtccagcgtgtttatgaggggtcgccacttaatctacctgcgcttgtggtatgatggccacgtgggttctgtggtccccgccatgagctttggatacagcgccttgcactgtgggattttgaacaatattgtggtgctgtgctgcagttactgtgctgatttaagtgagatcagggtgcgctgctgtgcccggaggacaaggcgccttatgctgcgggcggtgcgaatcatcgctgaggagaccactgccatgttgtattcctgcaggacggagcggcggcggcagcagtttattcgcgcgctgctgcagcaccaccgccctatcctgatgcacgattatgactctacccccatgtaggcgtggacttctccttcgccgcccgttaagcaaccgcaagttggacagcagcctgtggctcagcagctggacagcgacatgaacttaagtgagctgcccggggagtttattaatatcactgatgagcgtttggctcgacaggaaaccgtgtggaatataacacctaagaatatgtctgttacccatgatatgatgctttttaaggccagccggggagaaaggactgtgtactctgtgtgttgggagggaggtggcaggttgaatactagggttctgtgagtttgattaaggtacggtgatctgtataagctatgtggtggtggggctatactactgaatgaaaaatgacttgaaattttctgcaattgaaaaataaacacgttgaaacataacacaaacgattctttattcttgggcaatgtatgaaaaagtgtaagaggatgtggcaaatatttcattaatgtagttgtggccagaccagtcccatgaaaatgacatagagtatgcacttggagttgtgtctcctgtttcctgtgtaccgtttagtgtaatggttagtgttacaggtttagttttgtctccgtttaagtaaacttgactgacaatgttacttttggcagttttaccgtgagattttggataagctgataggttaggcataaatccaacagcgtttgtataggctgtcgcccctcctgacgcggtaggaggaggggagggtgccctgcatgtctgccgctgctcttgctcttgccgctgctgaggaggggggcgcatctgccgcagcaccggatgcatctgggaaaagcaaaaaaggggctcgtccctgtttccggaggaatttgcaagcggggtcttgcatgacggggaggcaaacccccgttcgccgcagtccggccggtccgagactcgaaccgggggtcccgcgactcaacccttggaaaataaccctccggctacagggagcgagccacttaatgctttcgctttccagcctaaccgcttacgctgcgcgcggccagtggccaaaaaagctagcgcagcagccgccgcgcctggaaggaagccaaaaggagcactcccccgttgtctgacgtcgcacacctgggttcgacacgcgggcggtaaccgcatggatcacggcggacggccggatacggggctcgaaccccggtcgtccgccatgatacccttgcgaatttatccaccagaccacggaagagtgcccgcttacaggctctccttttgcacggtctagagcgtcaacgattgcgcgcgcctgaccggccagagcgtcccgaccatggagcactttttgccgctgcgcaacatctggaaccgcgtccgcgactttccgcgcgcctccaccaccgccgccggcatcacctggatgtccaggtacatctacggata

SEQ ID NO: 125 - DNA, 8420 bp, synthetic construct
  source 1..8420: mol_type = other DNA
tttatttgtacactctcgggtgattatttacccccacccttgccgtctgcgccgtttaaaaatcaaaggggttctgccgcgcatcgctatgcgccactggcagggacacgttgcgatactggtgtttagtgctccacttaaactcaggcacaaccatccgcggcagctcggtgaagttttcactccacaggctgcgcaccatcaccaacgcgtttagcaggtcgggcgccgatatcttgaagtcgcagttggggcctccgccctgcgcgcgcgagttgcgatacacagggttgcagcactggaacactatcagcgccgggtggtgcacgctggccagcacgctcttgtcggagatcagatccgcgtccaggtcctccgcgttgctcagggcgaacggagtcaactttggtagctgccttcccaaaaagggcgcgtgcccaggctttgagttgcactcgcaccgtagtggcatcaaaaggtgaccgtgcccggtctgggcgttaggatacagcgcctgcataaaagccttgatctgcttaaaagccacctgagcctttgcgccttcagagaagaacatgccgcaagacttgccggaaaactgattggccggacaggccgcgtcgtgcacgcagcaccttgcgtcggtgttggagatctgcaccacatttcggccccaccggttcttcacgatcttggccttgctagactgctccttcagcgcgcgctgcccgttttcgctcgtcacatccatttcaatcacgtgctccttatttatcataatgcttccgtgtagacacttaagctcgccttcgatctcagcgcagcggtgcagccacaacgcgcagcccgtgggctcgtgatgcttgtaggtcacctctgcaaacgactgcaggtacgcctgcaggaatcgccccatcatcgtcacaaaggtcttgttgctggtgaaggtcagctgcaacccgcggtgctcctcgttcagccaggtcttgcatacggccgccagagcttccacttggtcaggcagtagtttgaagttcgcctttagatcgttatccacgtggtacttgtccatcagcgcgcgcgcagcctccatgcccttctcccacgcagacacgatcggcacactcagcgggttcatcaccgtaatttcactttccgcttcgctgggctcttcctcttcctcttgcgtccgcataccacgcgccactgggtcgtcttcattcagccgccgcactgtgcgcttacctcctttgccatgcttgattagcaccggtgggttgctgaaacccaccatttgtagcgccacatcttctctttcttcctcgctgtccacgattacctctggtgatggcgggcgctcgggcttgggagaagggcgcttctttttcttcttgggcgcaatggccaaatccgccgccgaggtcgatggccgcgggctgggtgtgcgcggcaccagcgcgtcttgtgatgagtcttcctcgtcctcggactcgatacgccgcctcatccgcttttttgggggcgcccggggaggcggcggcgacggggacggggacgacacgtcctccatggttgggggacgtcgcgccgcaccgcgtccgcgctcgggggtggtttcgcgctgctcctcttcccgactggccatttccttctcctataggcagaaaaagatcatggagtcagtcgagaagaaggacagcctaaccgccccctctgagttcgccaccaccgcctccaccgatgccgccaacgcgcctaccaccttccccgtcgaggcacccccgcttgaggaggaggaagtgattatcgagcaggacccaggttttgtaagcgaagacgacgaggaccgctcagtaccaacagaggataaaaagcaagaccaggacaacgcagaggcaaacgaggaacaagtcgggcggggggacgaaaggcatggcgactacctagatgtgggagacgacgtgctgttgaagcatctgcagcgccagtgcgccattatctgcgacgcgttgcaagagcgcagcgatgtgcccctcgccatagcggatgtcagccttgcctacgaacgccacctattctcaccgcgcgtaccccccaaacgccaagaaaacggcacatgcgagcccaacccgcgcctcaacttctaccccgtatttgccgtgccagaggtgcttgccacctatcacatctttttccaaaactgcaagatacccctatcctgccgtgccaaccgcagccgagcggacaagcagctggccttgcggcagggcgctgtcatacctgatatcgcctcgctcaacgaagtgccaaaaatctttgagggtcttggacgcgacgagaagcgcgcggcaaacgctctgcaacaggaaaacagcgaaaatgaaagtcactctggagtgttggtggaactcgagggtgacaacgcgcgcctagccgtactaaaacgcagcatcgaggtcacccactttgcctacccggcacttaacctaccccccaaggtcatgagcacagtcatgagtgagctgatcgtgcgccgtgcgcagcccctggagagggatgcaaatttgcaagaacaaacagaggagggcctacccgcagttggcgacgagcagctagcgcgctggcttcaaacgcgcgagcctgccgacttggaggagcgacgcaaactaatgatggccgcagtgctcgttaccgtggagcttgagtgcatgcagcggttctttgctgacccggagatgcagcgcaagctagaggaaacattgcactacacctttcgacagggctacgtacgccaggcctgcaagatctccaacgtggagctctgcaacctggtctcctaccttggaattttgcacgaaaaccgccttgggcaaaacgtgcttcattccacgctcaagggcgaggcgcgccgcgactacgtccgcgactgcgtttacttatttctatgctacacctggcagacggccatgggcgtttggcagcagtgcttggaggagtgcaacctcaaggagctgcagaaactgctaaagcaaaacttgaaggacctatggacggccttcaacgagcgctccgtggccgcgcacctggcggacatcattttccccgaacgcctgcttaaaaccctgcaacagggtctgccagacttcaccagtcaaagcatgttgcagaactttaggaactttatcctagagcgctcaggaatcttgcccgccacctgctgtgcacttcctagcgactttgtgcccattaagtaccgcgaatgccctccgccgctttggggccactgctaccttctgcagctagccaactaccttgcctaccactctgacataatggaagacgtgagcggtgacggtctactggagtgtcactgtcgctgcaacctatgcaccccgcaccgctccctggtttgcaattcgcagctgcttaacgaaagtcaaattatcggtacctttgagctgcagggtccctcgcctgacgaaaagtccgcggctccggggttgaaactcactccggggctgtggacgtcggcttaccttcgcaaatttgtacctgaggactaccacgcccacgagattaggttctacgaagaccaatcccgcccgcctaatgcggagcttaccgcctgcgtcattacccagggccacattcttggccaattgcaagccatcaacaaagcccgccaagagtttctgctacgaaagggacggggggtttacttggacccccagtccggcgaggagctcaacccaatccccccgccgccgcagccctatcagcagcagccgcgggcccttgcttcccaggatggcacccaaaaagaagctgcagctgccgccgccacccacggacgaggaggaatactgggacagtcaggcagaggaggttttggacgaggaggaggaggacatgatggaagactgggagagcctagacgaggaagcttccgaggtcgaagaggtgtcagacgaaacaccgtcaccctcggtcgcattcccctcgccggcgccccagaaatcggcaaccggttccagcatggctacaacctccgctcctcaggcgccgccggcactgcccgttcgccgacccaaccgtagatgggacaccactggaaccagggccggtaagtccaagcagccgccgccgttagcccaagagcaacaacagcgccaaggctaccgctcatggcgcgggcacaagaacgccatagttgcttgcttgcaagactgtgggggcaacatctccttcgcccgccgctttcttctctaccatcacggcgtggccttcccccgtaacatcctgcattactaccgtcatctctacagcccatactgcaccggcggcagcggcagcaacagcagcggccacacagaagcaaaggcgaccggatagcaagactctgacaaagcccaagaaatccacagcggcggcagcagcaggaggaggagcgctgcgtctggcgcccaacgaacccgtatcgacccgcgagcttagaaacaggatttttcccactctgtatgctatatttcaacagagcaggggccaagaacaagagctgaaaataaaaaacaggtctctgcgatccctcacccgcagctgcctgtatcacaaaagcgaagatcagcttcggcgcacgctggaagacgcggaggctctcttcagtaaatactgcgcgctgactcttaaggactagtttcgcgccctttctcaaatttaagcgcgaaaactacgtcatctccagcggccacacccggcgccagcacctgttgtcagcgccattttttagggcggagtaacttgtatgtgttgggaattgtagttttcttaaaatgggaagtgacgtaacgtgggaaaacggaagtgacgatttgaggaagttgtgggttttttggctttcgtttctgggcgtaggttcgcgtgcggttttctgggtgttttttgtggactttaaccgttacgtcattttttagtcctatatatactcgctctgcacttggcccttttttacactgtgactgattgagctggtgccgtgtcgagtggtgtttttttaataggttttcttttttactggtaaggctgactgttatgcagaaacccgcagacatgtttgagagaaaaatggtgtctttttctgtggtggttccggagcttacctgcctttatctgcatgagcatgactacgatgtgctttcttttttgcgcgaggctttgcctgattttttgagcagcaccttgcattttatatcgccgcccatgcaacaagcttacatcggggctacgctggttagcatagctccgagtatgcgtgtcataatcagtgtgggttcttttgtcatggttcctggcggggaagtggccgcgctggtccgtgcagacctgcacgattatgttcagctggccctgcgaagggacctacgggatcgcggtatttttgttaatgttccgcttttgaatcttatacaggtctgtgaggaacctgaatttttgcaatcatgattcgctgcttgaggctgaaggtggagggcgctctggagcagatttttacaatggccggacttaatattcgggatttgcttagagatatattgagaaggtggcgagatgagaattatttgggcatggttgaaggtgctggaatgtttatagaggagattcaccctgaagggtttagcctttacgtccacttggacgtgagggccgtttgccttttggaagccattgtgcaacatcttacaaatgccattatctgttctttggctgtagagtttgaccacgccaccggaggggagcgcgttcacttaatagatcttcattttgaggttttggataatcttttggaataaaaaaaaaaaacatggttcttccagctcttcccgctcctcccgtgtgtgactcgcagaacgaatgtgtaggttggctgggtgtggcttattctgcggtggtggatgttatcagggcagcggcgcatgaaggagtttacatagaacccgaagccagggggcgcctggatgctttgagagagtggatatactacaactactacacagagcgatctaagcggcgagaccggagacgcagatctgtttgtcacgcccgcacctggttttgcttcaggaaatatgactacgtccggcgttccatttggcatgacactacgaccaacacgatctcggttgtctcggcgcactccgtacagtagggatcgtctacctccttttgagacagaaacccgcgctaccatactggaggatcatccgctgctgcccgaatgtaacactttgacaatgcacaacgtgagttacgtgcgaggtcttccctgcagtgtgggatttacgctgattcaggaatgggttgttccctgggatatggttctaacgcgggaggagcttgtaatcctgaggaagtgtatgcacgtgtgcctgtgttgtgccaacattgatatcatgacgagcatgatgatccatggttacgagtcctgggctctccactgtcattgttccagtcccggttccctgcagtgtatagccggcgggcaggttttggccagctggtttaggatggtggtggatggcgccatgtttaatcagaggtttatatggtaccgggaggtggtgaattacaacatgccaaaagaggtaatgtttatgtccagcgtgtttatgaggggtcgccacttaatctacctgcgcttgtggtatgatggccacgtgggttctgtggtccccgccatgagctttggatacagcgccttgcactgtgggattttgaacaatattgtggtgctgtgctgcagttactgtgctgatttaagtgagatcagggtgcgctgctgtgcccggaggacaaggcgccttatgctgcgggcggtgcgaatcatcgctgaggagaccactgccatgttgtattcctgcaggacggagcggcggcggcagcagtttattcgcgcgctgctgcagcaccaccgccctatcctgatgcacgattatgactctacccccatgtaggcgtggacttctccttcgccgcccgttaagcaaccgcaagttggacagcagcctgtggctcagcagctggacagcgacatgaacttaagtgagctgcccggggagtttattaatatcactgatgagcgtttggctcgacaggaaaccgtgtggaatataacacctaagaatatgtctgttacccatgatatgatgctttttaaggccagccggggagaaaggactgtgtactctgtgtgttgggagggaggtggcaggttgaatactagggttctgtgagtttgattaaggtacggtgatctgtataagctatgtggtggtggggctatactactgaatgaaaaatgacttgaaattttctgcaattgaaaaataaacacgttgaaacataacacaaacgattctttattcttgggcaatgtatgaaaaagtgtaagaggatgtggcaaatatttcattaatgtagttgtggccagaccagtcccatgaaaatgacatagagtatgcacttggagttgtgtctcctgtttcctgtgtaccgtttagtgtaatggttagtgttacaggtttagttttgtctccgtttaagtaaacttgactgacaatgttacttttggcagttttaccgtgagattttggataagctgataggttaggcataaatccaacagcgtttgtataggctgtcgcccctcctgacgcggtaggaggaggggagggtgccctgcatgtctgccgctgctcttgctcttgccgctgctgaggaggggggcgcatctgccgcagcaccggatgcatctgggaaaagcaaaaaaggggctcgtccctgtttccggaggaatttgcaagcggggtcttgcatgacggggaggcaaacccccgttcgccgcagtccggccggtccgagactcgaaccgggggtcccgcgactcaacccttggaaaataaccctccggctacagggagcgagccacttaatgctttcgctttccagcctaaccgcttacgctgcgcgcggccagtggccaaaaaagctagcgcagcagccgccgcgcctggaaggaagccaaaaggagcactcccccgttgtctgacgtcgcacacctgggttcgacacgcgggcggtaaccgcatggatcacggcggacggccggatacggggctcgaaccccggtcgtccgccatgatacccttgcgaatttatccaccagaccacggaagagtgcccgcttacaggctctccttttgcacggtctagagcgtcaacgattgcgcgcgcctgaccggccagagcgtcccgaccatggagcactttttgccgctgcgcaacatctggaaccgcgtccgcgactttccgcgcgcctccaccaccgccgccggcatcacctggatgtccaggtacatctacggata

SEQ ID NO: 126 - DNA, 7596 bp, synthetic construct
  source 1..7596: mol_type = other DNA
ttaaaaatcaaaggggttctgccgcgcatcgctatgcgccactggcagggacacgttgcgatactggtgtttagtgctccacttaaactcaggcacaaccatccgcggcagctcggtgaagttttcactccacaggctgcgcaccatcaccaacgcgtttagcaggtcgggcgccgatatcttgaagtcgcagttggggcctccgccctgcgcgcgcgagttgcgatacacagggttgcagcactggaacactatcagcgccgggtggtgcacgctggccagcacgctcttgtcggagatcagatccgcgtccaggtcctccgcgttgctcagggcgaacggagtcaactttggtagctgccttcccaaaaagggcgcgtgcccaggctttgagttgcactcgcaccgtagtggcatcaaaaggtgaccgtgcccggtctgggcgttaggatacagcgcctgcataaaagccttgatctgcttaaaagccacctgagcctttgcgccttcagagaagaacatgccgcaagacttgccggaaaactgattggccggacaggccgcgtcgtgcacgcagcaccttgcgtcggtgttggagatctgcaccacatttcggccccaccggttcttcacgatcttggccttgctagactgctccttcagcgcgcgctgcccgttttcgctcgtcacatccatttcaatcacgtgctccttatttatcataatgcttccgtgtagacacttaagctcgccttcgatctcagcgcagcggtgcagccacaacgcgcagcccgtgggctcgtgatgcttgtaggtcacctctgcaaacgactgcaggtacgcctgcaggaatcgccccatcatcgtcacaaaggtcttgttgctggtgaaggtcagctgcaacccgcggtgctcctcgttcagccaggtcttgcatacggccgccagagcttccacttggtcaggcagtagtttgaagttcgcctttagatcgttatccacgtggtacttgtccatcagcgcgcgcgcagcctccatgcccttctcccacgcagacacgatcggcacactcagcgggttcatcaccgtaatttcactttccgcttcgctgggctcttcctcttcctcttgcgtccgcataccacgcgccactgggtcgtcttcattcagccgccgcactgtgcgcttacctcctttgccatgcttgattagcaccggtgggttgctgaaacccaccatttgtagcgccacatcttctctttcttcctcgctgtccacgattacctctggtgatggcgggcgctcgggcttgggagaagggcgcttctttttcttcttgggcgcaatggccaaatccgccgccgaggtcgatggccgcgggctgggtgtgcgcggcaccagcgcgtcttgtgatgagtcttcctcgtcctcggactcgatacgccgcctcatccgcttttttgggggcgcccggggaggcggcggcgacggggacggggacgacacgtcctccatggttgggggacgtcgcgccgcaccgcgtccgcgctcgggggtggtttcgcgctgctcctcttcccgactggccatttccttctcctataggcagaaaaagatcatggagtcagtcgagaagaaggacagcctaaccgccccctctgagttcgccaccaccgcctccaccgatgccgccaacgcgcctaccaccttccccgtcgaggcacccccgcttgaggaggaggaagtgattatcgagcaggacccaggttttgtaagcgaagacgacgaggaccgctcagtaccaacagaggataaaaagcaagaccaggacaacgcagaggcaaacgaggaacaagtcgggcggggggacgaaaggcatggcgactacctagatgtgggagacgacgtgctgttgaagcatctgcagcgccagtgcgccattatctgcgacgcgttgcaagagcgcagcgatgtgcccctcgccatagcggatgtcagccttgcctacgaacgccacctattctcaccgcgcgtaccccccaaacgccaagaaaacggcacatgcgagcccaacccgcgcctcaacttctaccccgtatttgccgtgccagaggtgcttgccacctatcacatctttttccaaaactgcaagatacccctatcctgccgtgccaaccgcagccgagcggacaagcagctggccttgcggcagggcgctgtcatacctgatatcgcctcgctcaacgaagtgccaaaaatctttgagggtcttggacgcgacgagaagcgcgcggcaaacgctctgcaacaggaaaacagcgaaaatgaaagtcactctggagtgttggtggaactcgagggtgacaacgcgcgcctagccgtactaaaacgcagcatcgaggtcacccactttgcctacccggcacttaacctaccccccaaggtcatgagcacagtcatgagtgagctgatcgtgcgccgtgcgcagcccctggagagggatgcaaatttgcaagaacaaacagaggagggcctacccgcagttggcgacgagcagctagcgcgctggcttcaaacgcgcgagcctgccgacttggaggagcgacgcaaactaatgatggccgcagtgctcgttaccgtggagcttgagtgcatgcagcggttctttgctgacccggagatgcagcgcaagctagaggaaacattgcactacacctttcgacagggctacgtacgccaggcctgcaagatctccaacgtggagctctgcaacctggtctcctaccttggaattttgcacgaaaaccgccttgggcaaaacgtgcttcattccacgctcaagggcgaggcgcgccgcgactacgtccgcgactgcgtttacttatttctatgctacacctggcagacggccatgggcgtttggcagcagtgcttggaggagtgcaacctcaaggagctgcagaaactgctaaagcaaaacttgaaggacctatggacggccttcaacgagcgctccgtggccgcgcacctggcggacatcattttccccgaacgcctgcttaaaaccctgcaacagggtctgccagacttcaccagtcaaagcatgttgcagaactttaggaactttatcctagagcgctcaggaatcttgcccgccacctgctgtgcacttcctagcgactttgtgcccattaagtaccgcgaatgccctccgccgctttggggccactgctaccttctgcagctagccaactaccttgcctaccactctgacataatggaagacgtgagcggtgacggtctactggagtgtcactgtcgctgcaacctatgcaccccgcaccgctccctggtttgcaattcgcagctgcttaacgaaagtcaaattatcggtacctttgagctgcagggtccctcgcctgacgaaaagtccgcggctccggggttgaaactcactccggggctgtggacgtcggcttaccttcgcaaatttgtacctgaggactaccacgcccacgagattaggttctacgaagaccaatcccgcccgcctaatgcggagcttaccgcctgcgtcattacccagggccacattcttggccaattgcaagccatcaacaaagcccgccaagagtttctgctacgaaagggacggggggtttacttggacccccagtccggcgaggagctcaacccaatccccccgccgccgcagccctatcagcagcagccgcgggcccttgcttcccaggatggcacccaaaaagaagctgcagctgccgccgccacccacggacgaggaggaatactgggacagtcaggcagaggaggttttggacgaggaggaggaggacatgatggaagactgggagagcctagacgaggaagcttccgaggtcgaagaggtgtcagacgaaacaccgtcaccctcggtcgcattcccctcgccggcgccccagaaatcggcaaccggttccagcatggctacaacctccgctcctcaggcgccgccggcactgcccgttcgccgacccaaccgtagatgggacaccactggaaccagggccggtaagtccaagcagccgccgccgttagcccaagagcaacaacagcgccaaggctaccgctcatggcgcgggcacaagaacgccatagttgcttgcttgcaagactgtgggggcaacatctccttcgcccgccgctttcttctctaccatcacggcgtggccttcccccgtaacatcctgcattactaccgtcatctctacagcccatactgcaccggcggcagcggcagcaacagcagcggccacacagaagcaaaggcgaccggatagcaagactctgacaaagcccaagaaatccacagcggcggcagcagcaggaggaggagcgctgcgtctggcgcccaacgaacccgtatcgacccgcgagcttagaaacaggatttttcccactctgtatgctatatttcaacagagcaggggccaagaacaagagctgaaaataaaaaacaggtctctgcgatccctcacccgcagctgcctgtatcacaaaagcgaagatcagcttcggcgcacgctggaagacgcggaggctctcttcagtaaatactgcgcgctgactcttaaggactagtttcgcgccctttctcaaatttaagcgcgaaaactacgtcatctccagcggccacacccggcgccagcacctgttgtcagcgccattttttagggcggagtaacttgtatgtgttgggaattgtagttttcttaaaatgggaagtgacgtaacgtgggaaaacggaagtgacgatttgaggaagttgtgggttttttggctttcgtttctgggcgtaggttcgcgtgcggttttctgggtgttttttgtggactttaaccgttacgtcattttttagtcctatatatactcgctctgcacttggcccttttttacactgtgactgattgagctggtgccgtgtcgagtggtgtttttttaataggttttcttttttactggtaaggctgactgttatggttcttccagctcttcccgctcctcccgtgtgtgactcgcagaacgaatgtgtaggttggctgggtgtggcttattctgcggtggtggatgttatcagggcagcggcgcatgaaggagtttacatagaacccgaagccagggggcgcctggatgctttgagagagtggatatactacaactactacacagagcgatctaagcggcgagaccggagacgcagatctgtttgtcacgcccgcacctggttttgcttcaggaaatatgactacgtccggcgttccatttggcatgacactacgaccaacacgatctcggttgtctcggcgcactccgtacagtagggatcgtctacctccttttgagacagaaacccgcgctaccatactggaggatcatccgctgctgcccgaatgtaacactttgacaatgcacaacgtgagttacgtgcgaggtcttccctgcagtgtgggatttacgctgattcaggaatgggttgttccctgggatatggttctaacgcgggaggagcttgtaatcctgaggaagtgtatgcacgtgtgcctgtgttgtgccaacattgatatcatgacgagcatgatgatccatggttacgagtcctgggctctccactgtcattgttccagtcccggttccctgcagtgtatagccggcgggcaggttttggccagctggtttaggatggtggtggatggcgccatgtttaatcagaggtttatatggtaccgggaggtggtgaattacaacatgccaaaagaggtaatgtttatgtccagcgtgtttatgaggggtcgccacttaatctacctgcgcttgtggtatgatggccacgtgggttctgtggtccccgccatgagctttggatacagcgccttgcactgtgggattttgaacaatattgtggtgctgtgctgcagttactgtgctgatttaagtgagatcagggtgcgctgctgtgcccggaggacaaggcgccttatgctgcgggcggtgcgaatcatcgctgaggagaccactgccatgttgtattcctgcaggacggagcggcggcggcagcagtttattcgcgcgctgctgcagcaccaccgccctatcctgatgcacgattatgactctacccccatgtaggcgtggacttctccttcgccgcccgttaagcaaccgcaagttggacagcagcctgtggctcagcagctggacagcgacatgaacttaagtgagctgcccggggagtttattaatatcactgatgagcgtttggctcgacaggaaaccgtgtggaatataacacctaagaatatgtctgttacccatgatatgatgctttttaaggccagccggggagaaaggactgtgtactctgtgtgttgggagggaggtggcaggttgaatactagggttctgtgagtttgattaaggtacggtgatctgtataagctatgtggtggtggggctatactactgaatgaaaaatgacttgaaattttctgcaattgaaaaataaacacgttgaaacataacacaaacgattctttattcttgggcaatgtatgaaaaagtgtaagaggatgtggcaaatatttcattaatgtagttgtggccagaccagtcccatgaaaatgacatagagtatgcacttggagttgtgtctcctgtttcctgtgtaccgtttagtgtaatggttagtgttacaggtttagttttgtctccgtttaagtaaacttgactgacaatgttacttttggcagttttaccgtgagattttggataagctgataggttaggcataaatccaacagcgtttgtataggctgtcgcccctcctgacgcggtaggaggaggggagggtgccctgcatgtctgccgctgctcttgctcttgccgctgctgaggaggggggcgcatctgccgcagcaccggatgcatctgggaaaagcaaaaaaggggctcgtccctgtttccggaggaatttgcaagcggggtcttgcatgacggggaggcaaacccccgttcgccgcagtccggccggtccgagactcgaaccgggggtcccgcgactcaacccttggaaaataaccctccggctacagggagcgagccacttaatgctttcgctttccagcctaaccgcttacgctgcgcgcggccagtggccaaaaaagctagcgcagcagccgccgcgcctggaaggaagccaaaaggagcactcccccgttgtctgacgtcgcacacctgggttcgacacgcgggcggtaaccgcatggatcacggcggacggccggatacggggctcgaaccccggtcgtccgccatgatacccttgcgaatttatccaccagaccacggaagagtgcccgcttacaggctctccttttgcacggtctagagcgtcaacgattgcgcgcgcctgaccggccagagcgtcccgaccatggagcactttttgccgctgcgcaacatctggaaccgcgtccgcgactttccgcgcgcctccaccaccgccgccggcatcacctggatgtccaggtacatctacggata

SEQ ID NO: 127 - DNA, 7651 bp, synthetic construct
  source 1..7651: mol_type = other DNA
tttatttgtacactctcgggtgattatttacccccacccttgccgtctgcgccgtttaaaaatcaaaggggttctgccgcgcatcgctatgcgccactggcagggacacgttgcgatactggtgtttagtgctccacttaaactcaggcacaaccatccgcggcagctcggtgaagttttcactccacaggctgcgcaccatcaccaacgcgtttagcaggtcgggcgccgatatcttgaagtcgcagttggggcctccgccctgcgcgcgcgagttgcgatacacagggttgcagcactggaacactatcagcgccgggtggtgcacgctggccagcacgctcttgtcggagatcagatccgcgtccaggtcctccgcgttgctcagggcgaacggagtcaactttggtagctgccttcccaaaaagggcgcgtgcccaggctttgagttgcactcgcaccgtagtggcatcaaaaggtgaccgtgcccggtctgggcgttaggatacagcgcctgcataaaagccttgatctgcttaaaagccacctgagcctttgcgccttcagagaagaacatgccgcaagacttgccggaaaactgattggccggacaggccgcgtcgtgcacgcagcaccttgcgtcggtgttggagatctgcaccacatttcggccccaccggttcttcacgatcttggccttgctagactgctccttcagcgcgcgctgcccgttttcgctcgtcacatccatttcaatcacgtgctccttatttatcataatgcttccgtgtagacacttaagctcgccttcgatctcagcgcagcggtgcagccacaacgcgcagcccgtgggctcgtgatgcttgtaggtcacctctgcaaacgactgcaggtacgcctgcaggaatcgccccatcatcgtcacaaaggtcttgttgctggtgaaggtcagctgcaacccgcggtgctcctcgttcagccaggtcttgcatacggccgccagagcttccacttggtcaggcagtagtttgaagttcgcctttagatcgttatccacgtggtacttgtccatcagcgcgcgcgcagcctccatgcccttctcccacgcagacacgatcggcacactcagcgggttcatcaccgtaatttcactttccgcttcgctgggctcttcctcttcctcttgcgtccgcataccacgcgccactgggtcgtcttcattcagccgccgcactgtgcgcttacctcctttgccatgcttgattagcaccggtgggttgctgaaacccaccatttgtagcgccacatcttctctttcttcctcgctgtccacgattacctctggtgatggcgggcgctcgggcttgggagaagggcgcttctttttcttcttgggcgcaatggccaaatccgccgccgaggtcgatggccgcgggctgggtgtgcgcggcaccagcgcgtcttgtgatgagtcttcctcgtcctcggactcgatacgccgcctcatccgcttttttgggggcgcccggggaggcggcggcgacggggacggggacgacacgtcctccatggttgggggacgtcgcgccgcaccgcgtccgcgctcgggggtggtttcgcgctgctcctcttcccgactggccatttccttctcctataggcagaaaaagatcatggagtcagtcgagaagaaggacagcctaaccgccccctctgagttcgccaccaccgcctccaccgatgccgccaacgcgcctaccaccttccccgtcgaggcacccccgcttgaggaggaggaagtgattatcgagcaggacccaggttttgtaagcgaagacgacgaggaccgctcagtaccaacagaggataaaaagcaagaccaggacaacgcagaggcaaacgaggaacaagtcgggcggggggacgaaaggcatggcgactacctagatgtgggagacgacgtgctgttgaagcatctgcagcgccagtgcgccattatctgcgacgcgttgcaagagcgcagcgatgtgcccctcgccatagcggatgtcagccttgcctacgaacgccacctattctcaccgcgcgtaccccccaaacgccaagaaaacggcacatgcgagcccaacccgcgcctcaacttctaccccgtatttgccgtgccagaggtgcttgccacctatcacatctttttccaaaactgcaagatacccctatcctgccgtgccaaccgcagccgagcggacaagcagctggccttgcggcagggcgctgtcatacctgatatcgcctcgctcaacgaagtgccaaaaatctttgagggtcttggacgcgacgagaagcgcgcggcaaacgctctgcaacaggaaaacagcgaaaatgaaagtcactctggagtgttggtggaactcgagggtgacaacgcgcgcctagccgtactaaaacgcagcatcgaggtcacccactttgcctacccggcacttaacctaccccccaaggtcatgagcacagtcatgagtgagctgatcgtgcgccgtgcgcagcccctggagagggatgcaaatttgcaagaacaaacagaggagggcctacccgcagttggcgacgagcagctagcgcgctggcttcaaacgcgcgagcctgccgacttggaggagcgacgcaaactaatgatggccgcagtgctcgttaccgtggagcttgagtgcatgcagcggttctttgctgacccggagatgcagcgcaagctagaggaaacattgcactacacctttcgacagggctacgtacgccaggcctgcaagatctccaacgtggagctctgcaacctggtctcctaccttggaattttgcacgaaaaccgccttgggcaaaacgtgcttcattccacgctcaagggcgaggcgcgccgcgactacgtccgcgactgcgtttacttatttctatgctacacctggcagacggccatgggcgtttggcagcagtgcttggaggagtgcaacctcaaggagctgcagaaactgctaaagcaaaacttgaaggacctatggacggccttcaacgagcgctccgtggccgcgcacctggcggacatcattttccccgaacgcctgcttaaaaccctgcaacagggtctgccagacttcaccagtcaaagcatgttgcagaactttaggaactttatcctagagcgctcaggaatcttgcccgccacctgctgtgcacttcctagcgactttgtgcccattaagtaccgcgaatgccctccgccgctttggggccactgctaccttctgcagctagccaactaccttgcctaccactctgacataatggaagacgtgagcggtgacggtctactggagtgtcactgtcgctgcaacctatgcaccccgcaccgctccctggtttgcaattcgcagctgcttaacgaaagtcaaattatcggtacctttgagctgcagggtccctcgcctgacgaaaagtccgcggctccggggttgaaactcactccggggctgtggacgtcggcttaccttcgcaaatttgtacctgaggactaccacgcccacgagattaggttctacgaagaccaatcccgcccgcctaatgcggagcttaccgcctgcgtcattacccagggccacattcttggccaattgcaagccatcaacaaagcccgccaagagtttctgctacgaaagggacggggggtttacttggacccccagtccggcgaggagctcaacccaatccccccgccgccgcagccctatcagcagcagccgcgggcccttgcttcccaggatggcacccaaaaagaagctgcagctgccgccgccacccacggacgaggaggaatactgggacagtcaggcagaggaggttttggacgaggaggaggaggacatgatggaagactgggagagcctagacgaggaagcttccgaggtcgaagaggtgtcagacgaaacaccgtcaccctcggtcgcattcccctcgccggcgccccagaaatcggcaaccggttccagcatggctacaacctccgctcctcaggcgccgccggcactgcccgttcgccgacccaaccgtagatgggacaccactggaaccagggccggtaagtccaagcagccgccgccgttagcccaagagcaacaacagcgccaaggctaccgctcatggcgcgggcacaagaacgccatagttgcttgcttgcaagactgtgggggcaacatctccttcgcccgccgctttcttctctaccatcacggcgtggccttcccccgtaacatcctgcattactaccgtcatctctacagcccatactgcaccggcggcagcggcagcaacagcagcggccacacagaagcaaaggcgaccggatagcaagactctgacaaagcccaagaaatccacagcggcggcagcagcaggaggaggagcgctgcgtctggcgcccaacgaacccgtatcgacccgcgagcttagaaacaggatttttcccactctgtatgctatatttcaacagagcaggggccaagaacaagagctgaaaataaaaaacaggtctctgcgatccctcacccgcagctgcctgtatcacaaaagcgaagatcagcttcggcgcacgctggaagacgcggaggctctcttcagtaaatactgcgcgctgactcttaaggactagtttcgcgccctttctcaaatttaagcgcgaaaactacgtcatctccagcggccacacccggcgccagcacctgttgtcagcgccattttttagggcggagtaacttgtatgtgttgggaattgtagttttcttaaaatgggaagtgacgtaacgtgggaaaacggaagtgacgatttgaggaagttgtgggttttttggctttcgtttctgggcgtaggttcgcgtgcggttttctgggtgttttttgtggactttaaccgttacgtcattttttagtcctatatatactcgctctgcacttggcccttttttacactgtgactgattgagctggtgccgtgtcgagtggtgtttttttaataggttttcttttttactggtaaggctgactgttatggttcttccagctcttcccgctcctcccgtgtgtgactcgcagaacgaatgtgtaggttggctgggtgtggcttattctgcggtggtggatgttatcagggcagcggcgcatgaaggagtttacatagaacccgaagccagggggcgcctggatgctttgagagagtggatatactacaactactacacagagcgatctaagcggcgagaccggagacgcagatctgtttgtcacgcccgcacctggttttgcttcaggaaatatgactacgtccggcgttccatttggcatgacactacgaccaacacgatctcggttgtctcggcgcactccgtacagtagggatcgtctacctccttttgagacagaaacccgcgctaccatactggaggatcatccgctgctgcccgaatgtaacactttgacaatgcacaacgtgagttacgtgcgaggtcttccctgcagtgtgggatttacgctgattcaggaatgggttgttccctgggatatggttctaacgcgggaggagcttgtaatcctgaggaagtgtatgcacgtgtgcctgtgttgtgccaacattgatatcatgacgagcatgatgatccatggttacgagtcctgggctctccactgtcattgttccagtcccggttccctgcagtgtatagccggcgggcaggttttggccagctggtttaggatggtggtggatggcgccatgtttaatcagaggtttatatggtaccgggaggtggtgaattacaacatgccaaaagaggtaatgtttatgtccagcgtgtttatgaggggtcgccacttaatctacctgcgcttgtggtatgatggccacgtgggttctgtggtccccgccatgagctttggatacagcgccttgcactgtgggattttgaacaatattgtggtgctgtgctgcagttactgtgctgatttaagtgagatcagggtgcgctgctgtgcccggaggacaaggcgccttatgctgcgggcggtgcgaatcatcgctgaggagaccactgccatgttgtattcctgcaggacggagcggcggcggcagcagtttattcgcgcgctgctgcagcaccaccgccctatcctgatgcacgattatgactctacccccatgtaggcgtggacttctccttcgccgcccgttaagcaaccgcaagttggacagcagcctgtggctcagcagctggacagcgacatgaacttaagtgagctgcccggggagtttattaatatcactgatgagcgtttggctcgacaggaaaccgtgtggaatataacacctaagaatatgtctgttacccatgatatgatgctttttaaggccagccggggagaaaggactgtgtactctgtgtgttgggagggaggtggcaggttgaatactagggttctgtgagtttgattaaggtacggtgatctgtataagctatgtggtggtggggctatactactgaatgaaaaatgacttgaaattttctgcaattgaaaaataaacacgttgaaacataacacaaacgattctttattcttgggcaatgtatgaaaaagtgtaagaggatgtggcaaatatttcattaatgtagttgtggccagaccagtcccatgaaaatgacatagagtatgcacttggagttgtgtctcctgtttcctgtgtaccgtttagtgtaatggttagtgttacaggtttagttttgtctccgtttaagtaaacttgactgacaatgttacttttggcagttttaccgtgagattttggataagctgataggttaggcataaatccaacagcgtttgtataggctgtcgcccctcctgacgcggtaggaggaggggagggtgccctgcatgtctgccgctgctcttgctcttgccgctgctgaggaggggggcgcatctgccgcagcaccggatgcatctgggaaaagcaaaaaaggggctcgtccctgtttccggaggaatttgcaagcggggtcttgcatgacggggaggcaaacccccgttcgccgcagtccggccggtccgagactcgaaccgggggtcccgcgactcaacccttggaaaataaccctccggctacagggagcgagccacttaatgctttcgctttccagcctaaccgcttacgctgcgcgcggccagtggccaaaaaagctagcgcagcagccgccgcgcctggaaggaagccaaaaggagcactcccccgttgtctgacgtcgcacacctgggttcgacacgcgggcggtaaccgcatggatcacggcggacggccggatacggggctcgaaccccggtcgtccgccatgatacccttgcgaatttatccaccagaccacggaagagtgcccgcttacaggctctccttttgcacggtctagagcgtcaacgattgcgcgcgcctgaccggccagagcgtcccgaccatggagcactttttgccgctgcgcaacatctggaaccgcgtccgcgactttccgcgcgcctccaccaccgccgccggcatcacctggatgtccaggtacatctacggata

SEQ ID NO: 128 - DNA, 8831 bp, synthetic construct; identical to SEQ ID NO: 16
  source 1..8831: mol_type = other DNA

SEQ ID NO: 129 - DNA, 5281 bp, synthetic construct
  source 1..5281: mol_type = other DNA
tttatttgtacactctcgggtgattatttacccccacccttgccgtctgcgccgtttaaaaatcaaaggggttctgccgcgcatcgctatgcgccactggcagggacacgttgcgatactggtgtttagtgctccacttaaactcaggcacaaccatccgcggcagctcggtgaagttttcactccacaggctgcgcaccatcaccaacgcgtttagcaggtcgggcgccgatatcttgaagtcgcagttggggcctccgccctgcgcgcgcgagttgcgatacacagggttgcagcactggaacactatcagcgccgggtggtgcacgctggccagcacgctcttgtcggagatcagatccgcgtccaggtcctccgcgttgctcagggcgaacggagtcaactttggtagctgccttcccaaaaagggcgcgtgcccaggctttgagttgcactcgcaccgtagtggcatcaaaaggtgaccgtgcccggtctgggcgttaggatacagcgcctgcataaaagccttgatctgcttaaaagccacctgagcctttgcgccttcagagaagaacatgccgcaagacttgccggaaaactgattggccggacaggccgcgtcgtgcacgcagcaccttgcgtcggtgttggagatctgcaccacatttcggccccaccggttcttcacgatcttggccttgctagactgctccttcagcgcgcgctgcccgttttcgctcgtcacatccatttcaatcacgtgctccttatttatcataatgcttccgtgtagacacttaagctcgccttcgatctcagcgcagcggtgcagccacaacgcgcagcccgtgggctcgtgatgcttgtaggtcacctctgcaaacgactgcaggtacgcctgcaggaatcgccccatcatcgtcacaaaggtcttgttgctggtgaaggtcagctgcaacccgcggtgctcctcgttcagccaggtcttgcatacggccgccagagcttccacttggtcaggcagtagtttgaagttcgcctttagatcgttatccacgtggtacttgtccatcagcgcgcgcgcagcctccatgcccttctcccacgcagacacgatcggcacactcagcgggttcatcaccgtaatttcactttccgcttcgctgggctcttcctcttcctcttgcgtccgcataccacgcgccactgggtcgtcttcattcagccgccgcactgtgcgcttacctcctttgccatgcttgattagcaccggtgggttgctgaaacccaccatttgtagcgccacatcttctctttcttcctcgctgtccacgattacctctggtgatggcgggcgctcgggcttgggagaagggcgcttctttttcttcttgggcgcaatggccaaatccgccgccgaggtcgatggccgcgggctgggtgtgcgcggcaccagcgcgtcttgtgatgagtcttcctcgtcctcggactcgatacgccgcctcatccgcttttttgggggcgcccggggaggcggcggcgacggggacggggacgacacgtcctccatggttgggggacgtcgcgccgcaccgcgtccgcgctcgggggtggtttcgcgctgctcctcttcccgactggccatttccttctcctataggcagaaaaagatcgttgaaactcactccggggctgtggacgtcggcttaccttcgcaaatttgtacctgaggactaccacgcccacgagattaggttctacgaagaccaatcccgcccgcctaatgcggagcttaccgcctgcgtcattacccagggccacattcttggccaattgcaagccatcaacaaagcccgccaagagtttctgctacgaaagggacggggggtttacttggacccccagtccggcgaggagctcaacccaatccccccgccgccgcagccctatcagcagcagccgcgggcccttgcttcccaggatggcacccaaaaagaagctgcagctgccgccgccacccacggacgaggaggaatactgggacagtcaggcagaggaggttttggacgaggaggaggaggacatgatggaagactgggagagcctagacgaggaagcttccgaggtcgaagaggtgtcagacgaaacaccgtcaccctcggtcgcattcccctcgccggcgccccagaaatcggcaaccggttccagcatggctacaacctccgctcctcaggcgccgccggcactgcccgttcgccgacccaaccgtagatgggacaccactggaaccagggccggtaagtccaagcagccgccgccgttagcccaagagcaacaacagcgccaaggctaccgctcatggcgcgggcacaagaacgccatagttgcttgcttgcaagactgtgggggcaacatctccttcgcccgccgctttcttctctaccatcacggcgtggccttcccccgtaacatcctgcattactaccgtcatctctacagcccatactgcaccggcggcagcggcagcaacagcagcggccacacagaagcaaaggcgaccggatagcaagactctgacaaagcccaagaaatccacagcggcggcagcagcaggaggaggagcgctgcgtctggcgcccaacgaacccgtatcgacccgcgagcttagaaacaggatttttcccactctgtatgctatatttcaacagagcaggggccaagaacaagagctgaaaataaaaaacaggtctctgcgatccctcacccgcagctgcctgtatcacaaaagcgaagatcagcttcggcgcacgctggaagacgcggaggctctcttcagtaaatactgcgcgctgactcttaaggactagtttcgcgccctttctcaaatttaagcgcgaaaactacgtcatctccagcggccacacccggcgccagcacctgttgtcagcgccattttttagggcggagtaacttgtatgtgttgggaattgtagttttcttaaaatgggaagtgacgtaacgtgggaaaacggaagtgacgatttgaggaagttgtgggttttttggctttcgtttctgggcgtaggttcgcgtgcggttttctgggtgttttttgtggactttaaccgttacgtcattttttagtcctatatatactcgctctgcacttggcccttttttacactgtgactgattgagctggtgccgtgtcgagtggtgtttttttaataggttttcttttttactggtaaggctgactgttatgactacgtccggcgttccatttggcatgacactacgaccaacacgatctcggttgtctcggcgcactccgtacagtagggatcgtctacctccttttgagacagaaacccgcgctaccatactggaggatcatccgctgctgcccgaatgtaacactttgacaatgcacaacgtgagttacgtgcgaggtcttccctgcagtgtgggatttacgctgattcaggaatgggttgttccctgggatatggttctaacgcgggaggagcttgtaatcctgaggaagtgtatgcacgtgtgcctgtgttgtgccaacattgatatcatgacgagcatgatgatccatggttacgagtcctgggctctccactgtcattgttccagtcccggttccctgcagtgtatagccggcgggcaggttttggccagctggtttaggatggtggtggatggcgccatgtttaatcagaggtttatatggtaccgggaggtggtgaattacaacatgccaaaagaggtaatgtttatgtccagcgtgtttatgaggggtcgccacttaatctacctgcgcttgtggtatgatggccacgtgggttctgtggtccccgccatgagctttggatacagcgccttgcactgtgggattttgaacaatattgtggtgctgtgctgcagttactgtgctgatttaagtgagatcagggtgcgctgctgtgcccggaggacaaggcgccttatgctgcgggcggtgcgaatcatcgctgaggagaccactgccatgttgtattcctgcaggacggagcggcggcggcagcagtttattcgcgcgctgctgcagcaccaccgccctatcctgatgcacgattatgactctacccccatgtaggtttgattaaggtacggtgatctgtataagctatgtggtggtggggctatactactgaatgaaaaatgacttgaaattttctgcaattgaaaaataaacacgttgaaacataacacaaacgattctttattcttgggcaatgtatgaaaaagtgtaagaggatgtggcaaatatttcattaatgtagttgtggccagaccagtcccatgaaaatgacatagagtatgcacttggagttgtgtctcctgtttcctgtgtaccgtttagtgtaatggttagtgttacaggtttagttttgtctccgtttaagtaaacttgactgacaatgttacttttggcagttttaccgtgagattttggataagctgataggttaggcataaatccaacagcgtttgtataggctgtcgcccctcctgacgcggtaggaggaggggagggtgccctgcatgtctgccgctgctcttgctcttgccgctgctgaggaggggggcgcatctgccgcagcaccggatgcatctgggaaaagcaaaaaaggggctcgtccctgtttccggaggaatttgcaagcggggtcttgcatgacggggaggcaaacccccgttcgccgcagtccggccggtccgagactcgaaccgggggtcccgcgactcaacccttggaaaataaccctccggctacagggagcgagccacttaatgctttcgctttccagcctaaccgcttacgctgcgcgcggccagtggccaaaaaagctagcgcagcagccgccgcgcctggaaggaagccaaaaggagcactcccccgttgtctgacgtcgcacacctgggttcgacacgcgggcggtaaccgcatggatcacggcggacggccggatacggggctcgaaccccggtcgtccgccatgatacccttgcgaatttatccaccagaccacggaagagtgcccgcttacaggctctccttttgcacggtctagagcgtcaacgattgcgcgcgcctgaccggccagagcgtcccgaccatggagcactttttgccgctgcgcaacatctggaaccgcgtccgcgactttccgcgcgcctccaccaccgccgccggcatcacctggatgtccaggtacatctacggata

SEQ ID NO: 130 - DNA, 5226 bp, synthetic construct
  source 1..5226: mol_type = other DNA
ttaaaaatcaaaggggttctgccgcgcatcgctatgcgccactggcagggacacgttgcgatactggtgtttagtgctccacttaaactcaggcacaaccatccgcggcagctcggtgaagttttcactccacaggctgcgcaccatcaccaacgcgtttagcaggtcgggcgccgatatcttgaagtcgcagttggggcctccgccctgcgcgcgcgagttgcgatacacagggttgcagcactggaacactatcagcgccgggtggtgcacgctggccagcacgctcttgtcggagatcagatccgcgtccaggtcctccgcgttgctcagggcgaacggagtcaactttggtagctgccttcccaaaaagggcgcgtgcccaggctttgagttgcactcgcaccgtagtggcatcaaaaggtgaccgtgcccggtctgggcgttaggatacagcgcctgcataaaagccttgatctgcttaaaagccacctgagcctttgcgccttcagagaagaacatgccgcaagacttgccggaaaactgattggccggacaggccgcgtcgtgcacgcagcaccttgcgtcggtgttggagatctgcaccacatttcggccccaccggttcttcacgatcttggccttgctagactgctccttcagcgcgcgctgcccgttttcgctcgtcacatccatttcaatcacgtgctccttatttatcataatgcttccgtgtagacacttaagctcgccttcgatctcagcgcagcggtgcagccacaacgcgcagcccgtgggctcgtgatgcttgtaggtcacctctgcaaacgactgcaggtacgcctgcaggaatcgccccatcatcgtcacaaaggtcttgttgctggtgaaggtcagctgcaacccgcggtgctcctcgttcagccaggtcttgcatacggccgccagagcttccacttggtcaggcagtagtttgaagttcgcctttagatcgttatccacgtggtacttgtccatcagcgcgcgcgcagcctccatgcccttctcccacgcagacacgatcggcacactcagcgggttcatcaccgtaatttcactttccgcttcgctgggctcttcctcttcctcttgcgtccgcataccacgcgccactgggtcgtcttcattcagccgccgcactgtgcgcttacctcctttgccatgcttgattagcaccggtgggttgctgaaacccaccatttgtagcgccacatcttctctttcttcctcgctgtccacgattacctctggtgatggcgggcgctcgggcttgggagaagggcgcttctttttcttcttgggcgcaatggccaaatccgccgccgaggtcgatggccgcgggctgggtgtgcgcggcaccagcgcgtcttgtgatgagtcttcctcgtcctcggactcgatacgccgcctcatccgcttttttgggggcgcccggggaggcggcggcgacggggacggggacgacacgtcctccatggttgggggacgtcgcgccgcaccgcgtccgcgctcgggggtggtttcgcgctgctcctcttcccgactggccatttccttctcctataggcagaaaaagatcgttgaaactcactccggggctgtggacgtcggcttaccttcgcaaatttgtacctgaggactaccacgcccacgagattaggttctacgaagaccaatcccgcccgcctaatgcggagcttaccgcctgcgtcattacccagggccacattcttggccaattgcaagccatcaacaaagcccgccaagagtttctgctacgaaagggacggggggtttacttggacccccagtccggcgaggagctcaacccaatccccccgccgccgcagccctatcagcagcagccgcgggcccttgcttcccaggatggcacccaaaaagaagctgcagctgccgccgccacccacggacgaggaggaatactgggacagtcaggcagaggaggttttggacgaggaggaggaggacatgatggaagactgggagagcctagacgaggaagcttccgaggtcgaagaggtgtcagacgaaacaccgtcaccctcggtcgcattcccctcgccggcgccccagaaatcggcaaccggttccagcatggctacaacctccgctcctcaggcgccgccggcactgcccgttcgccgacccaaccgtagatgggacaccactggaaccagggccggtaagtccaagcagccgccgccgttagcccaagagcaacaacagcgccaaggctaccgctcatggcgcgggcacaagaacgccatagttgcttgcttgcaagactgtgggggcaacatctccttcgcccgccgctttcttctctaccatcacggcgtggccttcccccgtaacatcctgcattactaccgtcatctctacagcccatactgcaccggcggcagcggcagcaacagcagcggccacacagaagcaaaggcgaccggatagcaagactctgacaaagcccaagaaatccacagcggcggcagcagcaggaggaggagcgctgcgtctggcgcccaacgaacccgtatcgacccgcgagcttagaaacaggatttttcccactctgtatgctatatttcaacagagcaggggccaagaacaagagctgaaaataaaaaacaggtctctgcgatccctcacccgcagctgcctgtatcacaaaagcgaagatcagcttcggcgcacgctggaagacgcggaggctctcttcagtaaatactgcgcgctgactcttaaggactagtttcgcgccctttctcaaatttaagcgcgaaaactacgtcatctccagcggccacacccggcgccagcacctgttgtcagcgccattttttagggcggagtaacttgtatgtgttgggaattgtagttttcttaaaatgggaagtgacgtaacgtgggaaaacggaagtgacgatttgaggaagttgtgggttttttggctttcgtttctgggcgtaggttcgcgtgcggttttctgggtgttttttgtggactttaaccgttacgtcattttttagtcctatatatactcgctctgcacttggcccttttttacactgtgactgattgagctggtgccgtgtcgagtggtgtttttttaataggttttcttttttactggtaaggctgactgttatgactacgtccggcgttccatttggcatgacactacgaccaacacgatctcggttgtctcggcgcactccgtacagtagggatcgtctacctccttttgagacagaaacccgcgctaccatactggaggatcatccgctgctgcccgaatgtaacactttgacaatgcacaacgtgagttacgtgcgaggtcttccctgcagtgtgggatttacgctgattcaggaatgggttgttccctgggatatggttctaacgcgggaggagcttgtaatcctgaggaagtgtatgcacgtgtgcctgtgttgtgccaacattgatatcatgacgagcatgatgatccatggttacgagtcctgggctctccactgtcattgttccagtcccggttccctgcagtgtatagccggcgggcaggttttggccagctggtttaggatggtggtggatggcgccatgtttaatcagaggtttatatggtaccgggaggtggtgaattacaacatgccaaaagaggtaatgtttatgtccagcgtgtttatgaggggtcgccacttaatctacctgcgcttgtggtatgatggccacgtgggttctgtggtccccgccatgagctttggatacagcgccttgcactgtgggattttgaacaatattgtggtgctgtgctgcagttactgtgctgatttaagtgagatcagggtgcgctgctgtgcccggaggacaaggcgccttatgctgcgggcggtgcgaatcatcgctgaggagaccactgccatgttgtattcctgcaggacggagcggcggcggcagcagtttattcgcgcgctgctgcagcaccaccgccctatcctgatgcacgattatgactctacccccatgtaggtttgattaaggtacggtgatctgtataagctatgtggtggtggggctatactactgaatgaaaaatgacttgaaattttctgcaattgaaaaataaacacgttgaaacataacacaaacgattctttattcttgggcaatgtatgaaaaagtgtaagaggatgtggcaaatatttcattaatgtagttgtggccagaccagtcccatgaaaatgacatagagtatgcacttggagttgtgtctcctgtttcctgtgtaccgtttagtgtaatggttagtgttacaggtttagttttgtctccgtttaagtaaacttgactgacaatgttacttttggcagttttaccgtgagattttggataagctgataggttaggcataaatccaacagcgtttgtataggctgtcgcccctcctgacgcggtaggaggaggggagggtgccctgcatgtctgccgctgctcttgctcttgccgctgctgaggaggggggcgcatctgccgcagcaccggatgcatctgggaaaagcaaaaaaggggctcgtccctgtttccggaggaatttgcaagcggggtcttgcatgacggggaggcaaacccccgttcgccgcagtccggccggtccgagactcgaaccgggggtcccgcgactcaacccttggaaaataaccctccggctacagggagcgagccacttaatgctttcgctttccagcctaaccgcttacgctgcgcgcggccagtggccaaaaaagctagcgcagcagccgccgcgcctggaaggaagccaaaaggagcactcccccgttgtctgacgtcgcacacctgggttcgacacgcgggcggtaaccgcatggatcacggcggacggccggatacggggctcgaaccccggtcgtccgccatgatacccttgcgaatttatccaccagaccacggaagagtgcccgcttacaggctctccttttgcacggtctagagcgtcaacgattgcgcgcgcctgaccggccagagcgtcccgaccatggagcactttttgccgctgcgcaacatctggaaccgcgtccgcgactttccgcgcgcctccaccaccgccgccggcatcacctggatgtccaggtacatctacggata

SEQ ID NO: 131 - DNA, 5297 bp, synthetic construct
  source 1..5297: mol_type = other DNA
aataaaggcaaatgcttttatttgtacactctcgggtgattatttacccccacccttgccgtctgcgccgtttaaaaatcaaaggggttctgccgcgcatcgctatgcgccactggcagggacacgttgcgatactggtgtttagtgctccacttaaactcaggcacaaccatccgcggcagctcggtgaagttttcactccacaggctgcgcaccatcaccaacgcgtttagcaggtcgggcgccgatatcttgaagtcgcagttggggcctccgccctgcgcgcgcgagttgcgatacacagggttgcagcactggaacactatcagcgccgggtggtgcacgctggccagcacgctcttgtcggagatcagatccgcgtccaggtcctccgcgttgctcagggcgaacggagtcaactttggtagctgccttcccaaaaagggcgcgtgcccaggctttgagttgcactcgcaccgtagtggcatcaaaaggtgaccgtgcccggtctgggcgttaggatacagcgcctgcataaaagccttgatctgcttaaaagccacctgagcctttgcgccttcagagaagaacatgccgcaagacttgccggaaaactgattggccggacaggccgcgtcgtgcacgcagcaccttgcgtcggtgttggagatctgcaccacatttcggccccaccggttcttcacgatcttggccttgctagactgctccttcagcgcgcgctgcccgttttcgctcgtcacatccatttcaatcacgtgctccttatttatcataatgcttccgtgtagacacttaagctcgccttcgatctcagcgcagcggtgcagccacaacgcgcagcccgtgggctcgtgatgcttgtaggtcacctctgcaaacgactgcaggtacgcctgcaggaatcgccccatcatcgtcacaaaggtcttgttgctggtgaaggtcagctgcaacccgcggtgctcctcgttcagccaggtcttgcatacggccgccagagcttccacttggtcaggcagtagtttgaagttcgcctttagatcgttatccacgtggtacttgtccatcagcgcgcgcgcagcctccatgcccttctcccacgcagacacgatcggcacactcagcgggttcatcaccgtaatttcactttccgcttcgctgggctcttcctcttcctcttgcgtccgcataccacgcgccactgggtcgtcttcattcagccgccgcactgtgcgcttacctcctttgccatgcttgattagcaccggtgggttgctgaaacccaccatttgtagcgccacatcttctctttcttcctcgctgtccacgattacctctggtgatggcgggcgctcgggcttgggagaagggcgcttctttttcttcttgggcgcaatggccaaatccgccgccgaggtcgatggccgcgggctgggtgtgcgcggcaccagcgcgtcttgtgatgagtcttcctcgtcctcggactcgatacgccgcctcatccgcttttttgggggcgcccggggaggcggcggcgacggggacggggacgacacgtcctccatggttgggggacgtcgcgccgcaccgcgtccgcgctcgggggtggtttcgcgctgctcctcttcccgactggccatttccttctcctataggcagaaaaagatcgttgaaactcactccggggctgtggacgtcggcttaccttcgcaaatttgtacctgaggactaccacgcccacgagattaggttctacgaagaccaatcccgcccgcctaatgcggagcttaccgcctgcgtcattacccagggccacattcttggccaattgcaagccatcaacaaagcccgccaagagtttctgctacgaaagggacggggggtttacttggacccccagtccggcgaggagctcaacccaatccccccgccgccgcagccctatcagcagcagccgcgggcccttgcttcccaggatggcacccaaaaagaagctgcagctgccgccgccacccacggacgaggaggaatactgggacagtcaggcagaggaggttttggacgaggaggaggaggacatgatggaagactgggagagcctagacgaggaagcttccgaggtcgaagaggtgtcagacgaaacaccgtcaccctcggtcgcattcccctcgccggcgccccagaaatcggcaaccggttccagcatggctacaacctccgctcctcaggcgccgccggcactgcccgttcgccgacccaaccgtagatgggacaccactggaaccagggccggtaagtccaagcagccgccgccgttagcccaagagcaacaacagcgccaaggctaccgctcatggcgcgggcacaagaacgccatagttgcttgcttgcaagactgtgggggcaacatctccttcgcccgccgctttcttctctaccatcacggcgtggccttcccccgtaacatcctgcattactaccgtcatctctacagcccatactgcaccggcggcagcggcagcaacagcagcggccacacagaagcaaaggcgaccggatagcaagactctgacaaagcccaagaaatccacagcggcggcagcagcaggaggaggagcgctgcgtctggcgcccaacgaacccgtatcgacccgcgagcttagaaacaggatttttcccactctgtatgctatatttcaacagagcaggggccaagaacaagagctgaaaataaaaaacaggtctctgcgatccctcacccgcagctgcctgtatcacaaaagcgaagatcagcttcggcgcacgctggaagacgcggaggctctcttcagtaaatactgcgcgctgactcttaaggactagtttcgcgccctttctcaaatttaagcgcgaaaactacgtcatctccagcggccacacccggcgccagcacctgttgtcagcgccattttttagggcggagtaacttgtatgtgttgggaattgtagttttcttaaaatgggaagtgacgtaacgtgggaaaacggaagtgacgatttgaggaagttgtgggttttttggctttcgtttctgggcgtaggttcgcgtgcggttttctgggtgttttttgtggactttaaccgttacgtcattttttagtcctatatatactcgctctgcacttggcccttttttacactgtgactgattgagctggtgccgtgtcgagtggtgtttttttaataggttttcttttttactggtaaggctgactgttatgactacgtccggcgttccatttggcatgacactacgaccaacacgatctcggttgtctcggcgcactccgtacagtagggatcgtctacctccttttgagacagaaacccgcgctaccatactggaggatcatccgctgctgcccgaatgtaacactttgacaatgcacaacgtgagttacgtgcgaggtcttccctgcagtgtgggatttacgctgattcaggaatgggttgttccctgggatatggttctaacgcgggaggagcttgtaatcctgaggaagtgtatgcacgtgtgcctgtgttgtgccaacattgatatcatgacgagcatgatgatccatggttacgagtcctgggctctccactgtcattgttccagtcccggttccctgcagtgtatagccggcgggcaggttttggccagctggtttaggatggtggtggatggcgccatgtttaatcagaggtttatatggtaccgggaggtggtgaattacaacatgccaaaagaggtaatgtttatgtccagcgtgtttatgaggggtcgccacttaatctacctgcgcttgtggtatgatggccacgtgggttctgtggtccccgccatgagctttggatacagcgccttgcactgtgggattttgaacaatattgtggtgctgtgctgcagttactgtgctgatttaagtgagatcagggtgcgctgctgtgcccggaggacaaggcgccttatgctgcgggcggtgcgaatcatcgctgaggagaccactgccatgttgtattcctgcaggacggagcggcggcggcagcagtttattcgcgcgctgctgcagcaccaccgccctatcctgatgcacgattatgactctacccccatgtaggtttgattaaggtacggtgatctgtataagctatgtggtggtggggctatactactgaatgaaaaatgacttgaaattttctgcaattgaaaaataaacacgttgaaacataacacaaacgattctttattcttgggcaatgtatgaaaaagtgtaagaggatgtggcaaatatttcattaatgtagttgtggccagaccagtcccatgaaaatgacatagagtatgcacttggagttgtgtctcctgtttcctgtgtaccgtttagtgtaatggttagtgttacaggtttagttttgtctccgtttaagtaaacttgactgacaatgttacttttggcagttttaccgtgagattttggataagctgataggttaggcataaatccaacagcgtttgtataggctgtcgcccctcctgacgcggtaggaggaggggagggtgccctgcatgtctgccgctgctcttgctcttgccgctgctgaggaggggggcgcatctgccgcagcaccggatgcatctgggaaaagcaaaaaaggggctcgtccctgtttccggaggaatttgcaagcggggtcttgcatgacggggaggcaaacccccgttcgccgcagtccggccggtccgagactcgaaccgggggtcccgcgactcaacccttggaaaataaccctccggctacagggagcgagccacttaatgctttcgctttccagcctaaccgcttacgctgcgcgcggccagtggccaaaaaagctagcgcagcagccgccgcgcctggaaggaagccaaaaggagcactcccccgttgtctgacgtcgcacacctgggttcgacacgcgggcggtaaccgcatggatcacggcggacggccggatacggggctcgaaccccggtcgtccgccatgatacccttgcgaatttatccaccagaccacggaagagtgcccgcttacaggctctccttttgcacggtctagagcgtcaacgattgcgcgcgcctgaccggccagagcgtcccgaccatggagcactttttgccgctgcgcaacatctggaaccgcgtccgcgactttccgcgcgcctccaccaccgccgccggcatcacctggatgtccaggtacatctacggata

SEQ ID NO: 132 - DNA, 9755 bp, synthetic construct
  source 1..9755: mol_type = other DNA
tcgcgcgtttcggtgatgacggtgaaaacctctgacacatgcagctcccggagacggtcacagcttgtctgtaagcggatgccgggagcagacaagcccgtcagggcgcgtcagcgggtgttggcgggtgtcggggctggcttaactatgcggcatcagagcagattgtactgagagtgcaccatatgcggtgtgaaataccgcacagatgcgtaaggagaaaataccgcatcaggcgccattcgccattcaggctgcgcaactgttgggaagggcgatcggtgcgggcctcttcgctattacgccagctggcgaaagggggatgtgctgcaaggcgattaagttgggtaacgccagggttttcccagtcacgacgttgtaaaacgacggccagagaattctcgcgatagggataacagggtaataaataatgtactagagacactttcaataaaggcaaatgcttttatttgtacactctcgggtgattatttacccccacccttgccgtctgcgccgtttaaaaatcaaaggggttctgccgcgcatcgctatgcgccactggcagggacacgttgcgatactggtgtttagtgctccacttaaactcaggcacaaccatccgcggcagctcggtgaagttttcactccacaggctgcgcaccatcaccaacgcgtttagcaggtcgggcgccgatatcttgaagtcgcagttggggcctccgccctgcgcgcgcgagttgcgatacacagggttgcagcactggaacactatcagcgccgggtggtgcacgctggccagcacgctcttgtcggagatcagatccgcgtccaggtcctccgcgttgctcagggcgaacggagtcaactttggtagctgccttcccaaaaagggcgcgtgcccaggctttgagttgcactcgcaccgtagtggcatcaaaaggtgaccgtgcccggtctgggcgttaggatacagcgcctgcataaaagccttgatctgcttaaaagccacctgagcctttgcgccttcagagaagaacatgccgcaagacttgccggaaaactgattggccggacaggccgcgtcgtgcacgcagcaccttgcgtcggtgttggagatctgcaccacatttcggccccaccggttcttcacgatcttggccttgctagactgctccttcagcgcgcgctgcccgttttcgctcgtcacatccatttcaatcacgtgctccttatttatcataatgcttccgtgtagacacttaagctcgccttcgatctcagcgcagcggtgcagccacaacgcgcagcccgtgggctcgtgatgcttgtaggtcacctctgcaaacgactgcaggtacgcctgcaggaatcgccccatcatcgtcacaaaggtcttgttgctggtgaaggtcagctgcaacccgcggtgctcctcgttcagccaggtcttgcatacggccgccagagcttccacttggtcaggcagtagtttgaagttcgcctttagatcgttatccacgtggtacttgtccatcagcgcgcgcgcagcctccatgcccttctcccacgcagacacgatcggcacactcagcgggttcatcaccgtaatttcactttccgcttcgctgggctcttcctcttcctcttgcgtccgcataccacgcgccactgggtcgtcttcattcagccgccgcactgtgcgcttacctcctttgccatgcttgattagcaccggtgggttgctgaaacccaccatttgtagcgccacatcttctctttcttcctcgctgtccacgattacctctggtgatggcgggcgctcgggcttgggagaagggcgcttctttttcttcttgggcgcaatggccaaatccgccgccgaggtcgatggccgcgggctgggtgtgcgcggcaccagcgcgtcttgtgatgagtcttcctcgtcctcggactcgatacgccgcctcatccgcttttttgggggcgcccggggaggcggcggcgacggggacggggacgacacgtcctccatggttgggggacgtcgcgccgcaccgcgtccgcgctcgggggtggtttcgcgctgctcctcttcccgactggccatttccttctcctataggcagaaaaagatcatggagtcagtcgagaagaaggacagcctaaccgccccctctgagttcgccaccaccgcctccaccgatgccgccaacgcgcctaccaccttccccgtcgaggcacccccgcttgaggaggaggaagtgattatcgagcaggacccaggttttgtaagcgaagacgacgaggaccgctcagtaccaacagaggataaaaagcaagaccaggacaacgcagaggcaaacgaggaacaagtcgggcggggggacgaaaggcatggcgactacctagatgtgggagacgacgtgctgttgaagcatctgcagcgccagtgcgccattatctgcgacgcgttgcaagagcgcagcgatgtgcccctcgccatagcggatgtcagccttgcctacgaacgccacctattctcaccgcgcgtaccccccaaacgccaagaaaacggcacatgcgagcccaacccgcgcctcaacttctaccccgtatttgccgtgccagaggtgcttgccacctatcacatctttttccaaaactgcaagatacccctatcctgccgtgccaaccgcagccgagcggacaagcagctggccttgcggcagggcgctgtcatacctgatatcgcctcgctcaacgaagtgccaaaaatctttgagggtcttggacgcgacgagaagcgcgcggcaaacgctctgcaacaggaaaacagcgaaaatgaaagtcactctggagtgttggtggaactcgagggtgacaacgcgcgcctagccgtactaaaacgcagcatcgaggtcacccactttgcctacccggcacttaacctaccccccaaggtcatgagcacagtcatgagtgagctgatcgtgcgccgtgcgcagcccctggagagggatgcaaatttgcaagaacaaacagaggagggcctacccgcagttggcgacgagcagctagcgcgctggcttcaaacgcgcgagcctgccgacttggaggagcgacgcaaactaatgatggccgcagtgctcgttaccgtggagcttgagtgcatgcagcggttctttgctgacccggagatgcagcgcaagctagaggaaacattgcactacacctttcgacagggctacgtacgccaggcctgcaagatctccaacgtggagctctgcaacctggtctcctaccttggaattttgcacgaaaaccgccttgggcaaaacgtgcttcattccacgctcaagggcgaggcgcgccgcgactacgtccgcgactgcgtttacttatttctatgctacacctggcagacggccatgggcgtttggcagcagtgcttggaggagtgcaacctcaaggagctgcagaaactgctaaagcaaaacttgaaggacctatggacggccttcaacgagcgctccgtggccgcgcacctggcggacatcattttccccgaacgcctgcttaaaaccctgcaacagggtctgccagacttcaccagtcaaagcatgttgcagaactttaggaactttatcctagagcgctcaggaatcttgcccgccacctgctgtgcacttcctagcgactttgtgcccattaagtaccgcgaatgccctccgccgctttggggccactgctaccttctgcagctagccaactaccttgcctaccactctgacataatggaagacgtgagcggtgacggtctactggagtgtcactgtcgctgcaacctatgcaccccgcaccgctccctggtttgcaattcgcagctgcttaacgaaagtcaaattatcggtacctttgagctgcagggtccctcgcctgacgaaaagtccgcggctccggggttgaaactcactccggggctgtggacgtcggcttaccttcgcaaatttgtacctgaggactaccacgcccacgagattaggttctacgaagaccaatcccgcccgcctaatgcggagcttaccgcctgcgtcattacccagggccacattcttggccaattgcaagccatcaacaaagcccgccaagagtttctgctacgaaagggacggggggtttacttggacccccagtccggcgaggagctcaacccaatccccccgccgccgcagccctatcagcagcagccgcgggcccttgcttcccaggatggcacccaaaaagaagctgcagctgccgccgccacccacggacgaggaggaatactgggacagtcaggcagaggaggttttggacgaggaggaggaggacatgatggaagactgggagagcctagacgaggaagcttccgaggtcgaagaggtgtcagacgaaacaccgtcaccctcggtcgcattcccctcgccggcgccccagaaatcggcaaccggttccagcatggctacaacctccgctcctcaggcgccgccggcactgcccgttcgccgacccaaccgtagatgggacaccactggaaccagggccggtaagtccaagcagccgccgccgttagcccaagagcaacaacagcgccaaggctaccgctcatggcgcgggcacaagaacgccatagttgcttgcttgcaagactgtgggggcaacatctccttcgcccgccgctttcttctctaccatcacggcgtggccttcccccgtaacatcctgcattactaccgtcatctctacagcccatactgcaccggcggcagcggcagcaacagcagcggccacacagaagcaaaggcgaccggatagcaagactctgacaaagcccaagaaatccacagcggcggcagcagcaggaggaggagcgctgcgtctggcgcccaacgaacccgtatcgacccgcgagcttagaaacaggatttttcccactctgtatgctatatttcaacagagcaggggccaagaacaagagctgaaaataaaaaacaggtctctgcgatccctcacccgcagctgcctgtatcacaaaagcgaagatcagcttcggcgcacgctggaagacgcggaggctctcttcagtaaatactgcgcgctgactcttaaggactagtttcgcgccctttctcaaatttaagcgcgaaaactacgtcatctccagcggccacacccggcgccagcacctgttgtcagcgccattttttagggcggagtaacttgtatgtgttgggaattgtagttttcttaaaatgggaagtgacgtaacgtgggaaaacggaagtgacgatttgaggaagttgtgggttttttggctttcgtttctgggcgtaggttcgcgtgcggttttctgggtgttttttgtggactttaaccgttacgtcattttttagtcctatatatactcgctctgcacttggcccttttttacactgtgactgattgagctggtgccgtgtcgagtggtgtttttttaataggttttcttttttactggtaaggctgactgttatgactacgtccggcgttccatttggcatgacactacgaccaacacgatctcggttgtctcggcgcactccgtacagtagggatcgtctacctccttttgagacagaaacccgcgctaccatactggaggatcatccgctgctgcccgaatgtaacactttgacaatgcacaacgtgagttacgtgcgaggtcttccctgcagtgtgggatttacgctgattcaggaatgggttgttccctgggatatggttctaacgcgggaggagcttgtaatcctgaggaagtgtatgcacgtgtgcctgtgttgtgccaacattgatatcatgacgagcatgatgatccatggttacgagtcctgggctctccactgtcattgttccagtcccggttccctgcagtgtatagccggcgggcaggttttggccagctggtttaggatggtggtggatggcgccatgtttaatcagaggtttatatggtaccgggaggtggtgaattacaacatgccaaaagaggtaatgtttatgtccagcgtgtttatgaggggtcgccacttaatctacctgcgcttgtggtatgatggccacgtgggttctgtggtccccgccatgagctttggatacagcgccttgcactgtgggattttgaacaatattgtggtgctgtgctgcagttactgtgctgatttaagtgagatcagggtgcgctgctgtgcccggaggacaaggcgccttatgctgcgggcggtgcgaatcatcgctgaggagaccactgccatgttgtattcctgcaggacggagcggcggcggcagcagtttattcgcgcgctgctgcagcaccaccgccctatcctgatgcacgattatgactctacccccatgtaggtttgattaaggtacggtgatctgtataagctatgtggtggtggggctatactactgaatgaaaaatgacttgaaattttctgcaattgaaaaataaacacgttgaaacataacacaaacgattctttattcttgggcaatgtatgaaaaagtgtaagaggatgtggcaaatatttcattaatgtagttgtggccagaccagtcccatgaaaatgacatagagtatgcacttggagttgtgtctcctgtttcctgtgtaccgtttagtgtaatggttagtgttacaggtttagttttgtctccgtttaagtaaacttgactgacaatgttacttttggcagttttaccgtgagattttggataagctgataggttaggcataaatccaacagcgtttgtataggctgtcgcccctcctgacgcggtaggaggaggggagggtgccctgcatgtctgccgctgctcttgctcttgccgctgctgaggaggggggcgcatctgccgcagcaccggatgcatctgggaaaagcaaaaaaggggctcgtccctgtttccggaggaatttgcaagcggggtcttgcatgacggggaggcaaacccccgttcgccgcagtccggccggtccgagactcgaaccgggggtcccgcgactcaacccttggaaaataaccctccggctacagggagcgagccacttaatgctttcgctttccagcctaaccgcttacgctgcgcgcggccagtggccaaaaaagctagcgcagcagccgccgcgcctggaaggaagccaaaaggagcactcccccgttgtctgacgtcgcacacctgggttcgacacgcgggcggtaaccgcatggatcacggcggacggccggatacggggctcgaaccccggtcgtccgccatgatacccttgcgaatttatccaccagaccacggaagagtgcccgcttacaggctctccttttgcacggtctagagcgtcaacgattgcgcgcgcctgaccggccagagcgtcccgaccatggagcactttttgccgctgcgcaacatctggaaccgcgtccgcgactttccgcgcgcctccaccaccgccgccggcatcacctggatgtccaggtacatctacggatatggcaaacagctattatgggtattatgggtgcggccgcggatcccgggcccgtcgactgcagaggcctgcatgcaagcttggtgtaatcatggtcatagctgtttcctgtgtgaaattgttatccgctcacaattccacacaacatacgagccggaagcataaagtgtaaagcctggggtgcctaatgagtgagctaactcacattaattgcgttgcgctcactgcccgctttccagtcgggaaacctgtcgtgccagctgcattaatgaatcggccaacgcgcggggagaggcggtttgcgtattgggcgctcttccgcttcctcgctcactgactcgctgcgctcggtcgttcggctgcggcgagcggtatcagctcactcaaaggcggtaatacggttatccacagaatcaggggataacgcaggaaagaacatgtgagcaaaaggccagcaaaaggccaggaaccgtaaaaaggccgcgttgctggcgtttttccataggctccgcccccctgacgagcatcacaaaaatcgacgctcaagtcagaggtggcgaaacccgacaggactataaagataccaggcgtttccccctggaagctccctcgtgcgctctcctgttccgaccctgccgcttaccggatacctgtccgcctttctcccttcgggaagcgtggcgctttctcatagctcacgctgtaggtatctcagttcggtgtaggtcgttcgctccaagctgggctgtgtgcacgaaccccccgttcagcccgaccgctgcgccttatccggtaactatcgtcttgagtccaacccggtaagacacgacttatcgccactggcagcagccactggtaacaggattagcagagcgaggtatgtaggcggtgctacagagttcttgaagtggtggcctaactacggctacactagaagaacagtatttggtatctgcgctctgctgaagccagttaccttcggaaaaagagttggtagctcttgatccggcaaacaaaccaccgctggtagcggtggtttttttgtttgcaagcagcagattacgcgcagaaaaaaaggatctcaagaagatcctttgatcttttctacggggtctgacgctcagtggaacgaaaactcacgttaagggattttggtcatgagattatcaaaaaggatcttcacctagatccttttaaattaaaaatgaagttttaaatcaagcccaatctgaataatgttacaaccaattaaccaattctgattagaaaaactcatcgagcatcaaatgaaactgcaatttattcatatcaggattatcaataccatatttttgaaaaagccgtttctgtaatgaaggagaaaactcaccgaggcagttccataggatggcaagatcctggtatcggtctgcgattccgactcgtccaacatcaatacaacctattaatttcccctcgtcaaaaataaggttatcaagtgagaaatcaccatgagtgacgactgaatccggtgagaatggcaaaagtttatgcatttctttccagacttgttcaacaggccagccattacgctcgtcatcaaaatcactcgcatcaaccaaaccgttattcattcgtgattgcgcctgagcgagacgaaatacgcgatcgctgttaaaaggacaattacaaacaggaatcgaatgcaaccggcgcaggaacactgccagcgcatcaacaatattttcacctgaatcaggatattcttctaatacctggaatgctgtttttccggggatcgcagtggtgagtaaccatgcatcatcaggagtacggataaaatgcttgatggtcggaagaggcataaattccgtcagccagtttagtctgaccatctcatctgtaacatcattggcaacgctacctttgccatgtttcagaaacaactctggcgcatcgggcttcccatacaagcgatagattgtcgcacctgattgcccgacattatcgcgagcccatttatacccatataaatcagcatccatgttggaatttaatcgcggcctcgacgtttcccgttgaatatggctcataacaccccttgtattactgtttatgtaagcagacagttttattgttcatgatgatatatttttatcttgtgcaatgtaacatcagagattttgagacacgggccagagctgca

SEQ ID NO: 133 - DNA, 11068 bp, synthetic construct
  source 1..11068: mol_type = other DNA
tcgcgcgtttcggtgatgacggtgaaaacctctgacacatgcagctcccggagacggtcacagcttgtctgtaagcggatgccgggagcagacaagcccgtcagggcgcgtcagcgggtgttggcgggtgtcggggctggcttaactatgcggcatcagagcagattgtactgagagtgcaccatatgcggtgtgaaataccgcacagatgcgtaaggagaaaataccgcatcaggcgccattcgccattcaggctgcgcaactgttgggaagggcgatcggtgcgggcctcttcgctattacgccagctggcgaaagggggatgtgctgcaaggcgattaagttgggtaacgccagggttttcccagtcacgacgttgtaaaacgacggccagagaattctcgcgatagggataacagggtaataaataatgtactagagacactttcaataaaggcaaatgcttttatttgtacactctcgggtgattatttacccccacccttgccgtctgcgccgtttaaaaatcaaaggggttctgccgcgcatcgctatgcgccactggcagggacacgttgcgatactggtgtttagtgctccacttaaactcaggcacaaccatccgcggcagctcggtgaagttttcactccacaggctgcgcaccatcaccaacgcgtttagcaggtcgggcgccgatatcttgaagtcgcagttggggcctccgccctgcgcgcgcgagttgcgatacacagggttgcagcactggaacactatcagcgccgggtggtgcacgctggccagcacgctcttgtcggagatcagatccgcgtccaggtcctccgcgttgctcagggcgaacggagtcaactttggtagctgccttcccaaaaagggcgcgtgcccaggctttgagttgcactcgcaccgtagtggcatcaaaaggtgaccgtgcccggtctgggcgttaggatacagcgcctgcataaaagccttgatctgcttaaaagccacctgagcctttgcgccttcagagaagaacatgccgcaagacttgccggaaaactgattggccggacaggccgcgtcgtgcacgcagcaccttgcgtcggtgttggagatctgcaccacatttcggccccaccggttcttcacgatcttggccttgctagactgctccttcagcgcgcgctgcccgttttcgctcgtcacatccatttcaatcacgtgctccttatttatcataatgcttccgtgtagacacttaagctcgccttcgatctcagcgcagcggtgcagccacaacgcgcagcccgtgggctcgtgatgcttgtaggtcacctctgcaaacgactgcaggtacgcctgcaggaatcgccccatcatcgtcacaaaggtcttgttgctggtgaaggtcagctgcaacccgcggtgctcctcgttcagccaggtcttgcatacggccgccagagcttccacttggtcaggcagtagtttgaagttcgcctttagatcgttatccacgtggtacttgtccatcagcgcgcgcgcagcctccatgcccttctcccacgcagacacgatcggcacactcagcgggttcatcaccgtaatttcactttccgcttcgctgggctcttcctcttcctcttgcgtccgcataccacgcgccactgggtcgtcttcattcagccgccgcactgtgcgcttacctcctttgccatgcttgattagcaccggtgggttgctgaaacccaccatttgtagcgccacatcttctctttcttcctcgctgtccacgattacctctggtgatggcgggcgctcgggcttgggagaagggcgcttctttttcttcttgggcgcaatggccaaatccgccgccgaggtcgatggccgcgggctgggtgtgcgcggcaccagcgcgtcttgtgatgagtcttcctcgtcctcggactcgatacgccgcctcatccgcttttttgggggcgcccggggaggcggcggcgacggggacggggacgacacgtcctccatggttgggggacgtcgcgccgcaccgcgtccgcgctcgggggtggtttcgcgctgctcctcttcccgactggccatttccttctcctataggcagaaaaagatcatggagtcagtcgagaagaaggacagcctaaccgccccctctgagttcgccaccaccgcctccaccgatgccgccaacgcgcctaccaccttccccgtcgaggcacccccgcttgaggaggaggaagtgattatcgagcaggacccaggttttgtaagcgaagacgacgaggaccgctcagtaccaacagaggataaaaagcaagaccaggacaacgcagaggcaaacgaggaacaagtcgggcggggggacgaaaggcatggcgactacctagatgtgggagacgacgtgctgttgaagcatctgcagcgccagtgcgccattatctgcgacgcgttgcaagagcgcagcgatgtgcccctcgccatagcggatgtcagccttgcctacgaacgccacctattctcaccgcgcgtaccccccaaacgccaagaaaacggcacatgcgagcccaacccgcgcctcaacttctaccccgtatttgccgtgccagaggtgcttgccacctatcacatctttttccaaaactgcaagatacccctatcctgccgtgccaaccgcagccgagcggacaagcagctggccttgcggcagggcgctgtcatacctgatatcgcctcgctcaacgaagtgccaaaaatctttgagggtcttggacgcgacgagaagcgcgcggcaaacgctctgcaacaggaaaacagcgaaaatgaaagtcactctggagtgttggtggaactcgagggtgacaacgcgcgcctagccgtactaaaacgcagcatcgaggtcacccactttgcctacccggcacttaacctaccccccaaggtcatgagcacagtcatgagtgagctgatcgtgcgccgtgcgcagcccctggagagggatgcaaatttgcaagaacaaacagaggagggcctacccgcagttggcgacgagcagctagcgcgctggcttcaaacgcgcgagcctgccgacttggaggagcgacgcaaactaatgatggccgcagtgctcgttaccgtggagcttgagtgcatgcagcggttctttgctgacccggagatgcagcgcaagctagaggaaacattgcactacacctttcgacagggctacgtacgccaggcctgcaagatctccaacgtggagctctgcaacctggtctcctaccttggaattttgcacgaaaaccgccttgggcaaaacgtgcttcattccacgctcaagggcgaggcgcgccgcgactacgtccgcgactgcgtttacttatttctatgctacacctggcagacggccatgggcgtttggcagcagtgcttggaggagtgcaacctcaaggagctgcagaaactgctaaagcaaaacttgaaggacctatggacggccttcaacgagcgctccgtggccgcgcacctggcggacatcattttccccgaacgcctgcttaaaaccctgcaacagggtctgccagacttcaccagtcaaagcatgttgcagaactttaggaactttatcctagagcgctcaggaatcttgcccgccacctgctgtgcacttcctagcgactttgtgcccattaagtaccgcgaatgccctccgccgctttggggccactgctaccttctgcagctagccaactaccttgcctaccactctgacataatggaagacgtgagcggtgacggtctactggagtgtcactgtcgctgcaacctatgcaccccgcaccgctccctggtttgcaattcgcagctgcttaacgaaagtcaaattatcggtacctttgagctgcagggtccctcgcctgacgaaaagtccgcggctccggggttgaaactcactccggggctgtggacgtcggcttaccttcgcaaatttgtacctgaggactaccacgcccacgagattaggttctacgaagaccaatcccgcccgcctaatgcggagcttaccgcctgcgtcattacccagggccacattcttggccaattgcaagccatcaacaaagcccgccaagagtttctgctacgaaagggacggggggtttacttggacccccagtccggcgaggagctcaacccaatccccccgccgccgcagccctatcagcagcagccgcgggcccttgcttcccaggatggcacccaaaaagaagctgcagctgccgccgccacccacggacgaggaggaatactgggacagtcaggcagaggaggttttggacgaggaggaggaggacatgatggaagactgggagagcctagacgaggaagcttccgaggtcgaagaggtgtcagacgaaacaccgtcaccctcggtcgcattcccctcgccggcgccccagaaatcggcaaccggttccagcatggctacaacctccgctcctcaggcgccgccggcactgcccgttcgccgacccaaccgtagatgggacaccactggaaccagggccggtaagtccaagcagccgccgccgttagcccaagagcaacaacagcgccaaggctaccgctcatggcgcgggcacaagaacgccatagttgcttgcttgcaagactgtgggggcaacatctccttcgcccgccgctttcttctctaccatcacggcgtggccttcccccgtaacatcctgcattactaccgtcatctctacagcccatactgcaccggcggcagcggcagcaacagcagcggccacacagaagcaaaggcgaccggatagcaagactctgacaaagcccaagaaatccacagcggcggcagcagcaggaggaggagcgctgcgtctggcgcccaacgaacccgtatcgacccgcgagcttagaaacaggatttttcccactctgtatgctatatttcaacagagcaggggccaagaacaagagctgaaaataaaaaacaggtctctgcgatccctcacccgcagctgcctgtatcacaaaagcgaagatcagcttcggcgcacgctggaagacgcggaggctctcttcagtaaatactgcgcgctgactcttaaggactagtttcgcgccctttctcaaatttaagcgcgaaaactacgtcatctccagcggccacacccggcgccagcacctgttgtcagcgccattttttagggcggagtaacttgtatgtgttgggaattgtagttttcttaaaatgggaagtgacgtaacgtgggaaaacggaagtgacgatttgaggaagttgtgggttttttggctttcgtttctgggcgtaggttcgcgtgcggttttctgggtgttttttgtggactttaaccgttacgtcattttttagtcctatatatactcgctctgcacttggcccttttttacactgtgactgattgagctggtgccgtgtcgagtggtgtttttttaataggttttcttttttactggtaaggctgactgttatgcagaaacccgcagacatgtttgagagaaaaatggtgtctttttctgtggtggttccggagcttacctgcctttatctgcatgagcatgactacgatgtgctttcttttttgcgcgaggctttgcctgattttttgagcagcaccttgcattttatatcgccgcccatgcaacaagcttacatcggggctacgctggttagcatagctccgagtatgcgtgtcataatcagtgtgggttcttttgtcatggttcctggcggggaagtggccgcgctggtccgtgcagacctgcacgattatgttcagctggccctgcgaagggacctacgggatcgcggtatttttgttaatgttccgcttttgaatcttatacaggtctgtgaggaacctgaatttttgcaatcatgattcgctgcttgaggctgaaggtggagggcgctctggagcagatttttacaatggccggacttaatattcgggatttgcttagagatatattgagaaggtggcgagatgagaattatttgggcatggttgaaggtgctggaatgtttatagaggagattcaccctgaagggtttagcctttacgtccacttggacgtgagggccgtttgccttttggaagccattgtgcaacatcttacaaatgccattatctgttctttggctgtagagtttgaccacgccaccggaggggagcgcgttcacttaatagatcttcattttgaggttttggataatcttttggaataaaaaaaaaaaacatggttcttccagctcttcccgctcctcccgtgtgtgactcgcagaacgaatgtgtaggttggctgggtgtggcttattctgcggtggtggatgttatcagggcagcggcgcatgaaggagtttacatagaacccgaagccagggggcgcctggatgctttgagagagtggatatactacaactactacacagagcgatctaagcggcgagaccggagacgcagatctgtttgtcacgcccgcacctggttttgcttcaggaaatatgactacgtccggcgttccatttggcatgacactacgaccaacacgatctcggttgtctcggcgcactccgtacagtagggatcgtctacctccttttgagacagaaacccgcgctaccatactggaggatcatccgctgctgcccgaatgtaacactttgacaatgcacaacgtgagttacgtgcgaggtcttccctgcagtgtgggatttacgctgattcaggaatgggttgttccctgggatatggttctaacgcgggaggagcttgtaatcctgaggaagtgtatgcacgtgtgcctgtgttgtgccaacattgatatcatgacgagcatgatgatccatggttacgagtcctgggctctccactgtcattgttccagtcccggttccctgcagtgtatagccggcgggcaggttttggccagctggtttaggatggtggtggatggcgccatgtttaatcagaggtttatatggtaccgggaggtggtgaattacaacatgccaaaagaggtaatgtttatgtccagcgtgtttatgaggggtcgccacttaatctacctgcgcttgtggtatgatggccacgtgggttctgtggtccccgccatgagctttggatacagcgccttgcactgtgggattttgaacaatattgtggtgctgtgctgcagttactgtgctgatttaagtgagatcagggtgcgctgctgtgcccggaggacaaggcgccttatgctgcgggcggtgcgaatcatcgctgaggagaccactgccatgttgtattcctgcaggacggagcggcggcggcagcagtttattcgcgcgctgctgcagcaccaccgccctatcctgatgcacgattatgactctacccccatgtaggcgtggacttctccttcgccgcccgttaagcaaccgcaagttggacagcagcctgtggctcagcagctggacagcgacatgaacttaagtgagctgcccggggagtttattaatatcactgatgagcgtttggctcgacaggaaaccgtgtggaatataacacctaagaatatgtctgttacccatgatatgatgctttttaaggccagccggggagaaaggactgtgtactctgtgtgttgggagggaggtggcaggttgaatactagggttctgtgagtttgattaaggtacggtgatctgtataagctatgtggtggtggggctatactactgaatgaaaaatgacttgaaattttctgcaattgaaaaataaacacgttgaaacataacacaaacgattctttattcttgggcaatgtatgaaaaagtgtaagaggatgtggcaaatatttcattaatgtagttgtggccagaccagtcccatgaaaatgacatagagtatgcacttggagttgtgtctcctgtttcctgtgtaccgtttagtgtaatggttagtgttacaggtttagttttgtctccgtttaagtaaacttgactgacaatgttacttttggcagttttaccgtgagattttggataagctgataggttaggcataaatccaacagcgtttgtataggctgtcgcccctcctgacgcggtaggaggaggggagggtgccctgcatgtctgccgctgctcttgctcttgccgctgctgaggaggggggcgcatctgccgcagcaccggatgcatctgggaaaagcaaaaaaggggctcgtccctgtttccggaggaatttgcaagcggggtcttgcatgacggggaggcaaacccccgttcgccgcagtccggccggtccgagactcgaaccgggggtcccgcgactcaacccttggaaaataaccctccggctacagggagcgagccacttaatgctttcgctttccagcctaaccgcttacgctgcgcgcggccagtggccaaaaaagctagcgcagcagccgccgcgcctggaaggaagccaaaaggagcactcccccgttgtctgacgtcgcacacctgggttcgacacgcgggcggtaaccgcatggatcacggcggacggccggatacggggctcgaaccccggtcgtccgccatgatacccttgcgaatttatccaccagaccacggaagagtgcccgcttacaggctctccttttgcacggtctagagcgtcaacgattgcgcgcgcctgaccggccagagcgtcccgaccatggagcactttttgccgctgcgcaacatctggaaccgcgtccgcgactttccgcgcgcctccaccaccgccgccggcatcacctggatgtccaggtacatctacggatatggcaaacagctattatgggtattatgggtgcggccgcggatcccgggcccgtcgactgcagaggcctgcatgcaagcttggtgtaatcatggtcatagctgtttcctgtgtgaaattgttatccgctcacaattccacacaacatacgagccggaagcataaagtgtaaagcctggggtgcctaatgagtgagctaactcacattaattgcgttgcgctcactgcccgctttccagtcgggaaacctgtcgtgccagctgcattaatgaatcggccaacgcgcggggagaggcggtttgcgtattgggcgctcttccgcttcctcgctcactgactcgctgcgctcggtcgttcggctgcggcgagcggtatcagctcactcaaaggcggtaatacggttatccacagaatcaggggataacgcaggaaagaacatgtgagcaaaaggccagcaaaaggccaggaaccgtaaaaaggccgcgttgctggcgtttttccataggctccgcccccctgacgagcatcacaaaaatcgacgctcaagtcagaggtggcgaaacccgacaggactataaagataccaggcgtttccccctggaagctccctcgtgcgctctcctgttccgaccctgccgcttaccggatacctgtccgcctttctcccttcgggaagcgtggcgctttctcatagctcacgctgtaggtatctcagttcggtgtaggtcgttcgctccaagctgggctgtgtgcacgaaccccccgttcagcccgaccgctgcgccttatccggtaactatcgtcttgagtccaacccggtaagacacgacttatcgccactggcagcagccactggtaacaggattagcagagcgaggtatgtaggcggtgctacagagttcttgaagtggtggcctaactacggctacactagaagaacagtatttggtatctgcgctctgctgaagccagttaccttcggaaaaagagttggtagctcttgatccggcaaacaaaccaccgctggtagcggtggtttttttgtttgcaagcagcagattacgcgcagaaaaaaaggatctcaagaagatcctttgatcttttctacggggtctgacgctcagtggaacgaaaactcacgttaagggattttggtcatgagattatcaaaaaggatcttcacctagatccttttaaattaaaaatgaagttttaaatcaagcccaatctgaataatgttacaaccaattaaccaattctgattagaaaaactcatcgagcatcaaatgaaactgcaatttattcatatcaggattatcaataccatatttttgaaaaagccgtttctgtaatgaaggagaaaactcaccgaggcagttccataggatggcaagatcctggtatcggtctgcgattccgactcgtccaacatcaatacaacctattaatttcccctcgtcaaaaataaggttatcaagtgagaaatcaccatgagtgacgactgaatccggtgagaatggcaaaagtttatgcatttctttccagacttgttcaacaggccagccattacgctcgtcatcaaaatcactcgcatcaaccaaaccgttattcattcgtgattgcgcctgagcgagacgaaatacgcgatcgctgttaaaaggacaattacaaacaggaatcgaatgcaaccggcgcaggaacactgccagcgcatcaacaatattttcacctgaatcaggatattcttctaatacctggaatgctgtttttccggggatcgcagtggtgagtaaccatgcatcatcaggagtacggataaaatgcttgatggtcggaagaggcataaattccgtcagccagtttagtctgaccatctcatctgtaacatcattggcaacgctacctttgccatgtttcagaaacaactctggcgcatcgggcttcccatacaagcgatagattgtcgcacctgattgcccgacattatcgcgagcccatttatacccatataaatcagcatccatgttggaatttaatcgcggcctcgacgtttcccgttgaatatggctcataacaccccttgtattactgtttatgtaagcagacagttttattgttcatgatgatatatttttatcttgtgcaatgtaacatcagagattttgagacacgggccagagctgca

SEQ ID NO: 134 - DNA, 10299 bp, synthetic construct
  source 1..10299: mol_type = other DNA
tcgcgcgtttcggtgatgacggtgaaaacctctgacacatgcagctcccggagacggtcacagcttgtctgtaagcggatgccgggagcagacaagcccgtcagggcgcgtcagcgggtgttggcgggtgtcggggctggcttaactatgcggcatcagagcagattgtactgagagtgcaccatatgcggtgtgaaataccgcacagatgcgtaaggagaaaataccgcatcaggcgccattcgccattcaggctgcgcaactgttgggaagggcgatcggtgcgggcctcttcgctattacgccagctggcgaaagggggatgtgctgcaaggcgattaagttgggtaacgccagggttttcccagtcacgacgttgtaaaacgacggccagagaattctcgcgatagggataacagggtaataaataatgtactagagacactttcaataaaggcaaatgcttttatttgtacactctcgggtgattatttacccccacccttgccgtctgcgccgtttaaaaatcaaaggggttctgccgcgcatcgctatgcgccactggcagggacacgttgcgatactggtgtttagtgctccacttaaactcaggcacaaccatccgcggcagctcggtgaagttttcactccacaggctgcgcaccatcaccaacgcgtttagcaggtcgggcgccgatatcttgaagtcgcagttggggcctccgccctgcgcgcgcgagttgcgatacacagggttgcagcactggaacactatcagcgccgggtggtgcacgctggccagcacgctcttgtcggagatcagatccgcgtccaggtcctccgcgttgctcagggcgaacggagtcaactttggtagctgccttcccaaaaagggcgcgtgcccaggctttgagttgcactcgcaccgtagtggcatcaaaaggtgaccgtgcccggtctgggcgttaggatacagcgcctgcataaaagccttgatctgcttaaaagccacctgagcctttgcgccttcagagaagaacatgccgcaagacttgccggaaaactgattggccggacaggccgcgtcgtgcacgcagcaccttgcgtcggtgttggagatctgcaccacatttcggccccaccggttcttcacgatcttggccttgctagactgctccttcagcgcgcgctgcccgttttcgctcgtcacatccatttcaatcacgtgctccttatttatcataatgcttccgtgtagacacttaagctcgccttcgatctcagcgcagcggtgcagccacaacgcgcagcccgtgggctcgtgatgcttgtaggtcacctctgcaaacgactgcaggtacgcctgcaggaatcgccccatcatcgtcacaaaggtcttgttgctggtgaaggtcagctgcaacccgcggtgctcctcgttcagccaggtcttgcatacggccgccagagcttccacttggtcaggcagtagtttgaagttcgcctttagatcgttatccacgtggtacttgtccatcagcgcgcgcgcagcctccatgcccttctcccacgcagacacgatcggcacactcagcgggttcatcaccgtaatttcactttccgcttcgctgggctcttcctcttcctcttgcgtccgcataccacgcgccactgggtcgtcttcattcagccgccgcactgtgcgcttacctcctttgccatgcttgattagcaccggtgggttgctgaaacccaccatttgtagcgccacatcttctctttcttcctcgctgtccacgattacctctggtgatggcgggcgctcgggcttgggagaagggcgcttctttttcttcttgggcgcaatggccaaatccgccgccgaggtcgatggccgcgggctgggtgtgcgcggcaccagcgcgtcttgtgatgagtcttcctcgtcctcggactcgatacgccgcctcatccgcttttttgggggcgcccggggaggcggcggcgacggggacggggacgacacgtcctccatggttgggggacgtcgcgccgcaccgcgtccgcgctcgggggtggtttcgcgctgctcctcttcccgactggccatttccttctcctataggcagaaaaagatcatggagtcagtcgagaagaaggacagcctaaccgccccctctgagttcgccaccaccgcctccaccgatgccgccaacgcgcctaccaccttccccgtcgaggcacccccgcttgaggaggaggaagtgattatcgagcaggacccaggttttgtaagcgaagacgacgaggaccgctcagtaccaacagaggataaaaagcaagaccaggacaacgcagaggcaaacgaggaacaagtcgggcggggggacgaaaggcatggcgactacctagatgtgggagacgacgtgctgttgaagcatctgcagcgccagtgcgccattatctgcgacgcgttgcaagagcgcagcgatgtgcccctcgccatagcggatgtcagccttgcctacgaacgccacctattctcaccgcgcgtaccccccaaacgccaagaaaacggcacatgcgagcccaacccgcgcctcaacttctaccccgtatttgccgtgccagaggtgcttgccacctatcacatctttttccaaaactgcaagatacccctatcctgccgtgccaaccgcagccgagcggacaagcagctggccttgcggcagggcgctgtcatacctgatatcgcctcgctcaacgaagtgccaaaaatctttgagggtcttggacgcgacgagaagcgcgcggcaaacgctctgcaacaggaaaacagcgaaaatgaaagtcactctggagtgttggtggaactcgagggtgacaacgcgcgcctagccgtactaaaacgcagcatcgaggtcacccactttgcctacccggcacttaacctaccccccaaggtcatgagcacagtcatgagtgagctgatcgtgcgccgtgcgcagcccctggagagggatgcaaatttgcaagaacaaacagaggagggcctacccgcagttggcgacgagcagctagcgcgctggcttcaaacgcgcgagcctgccgacttggaggagcgacgcaaactaatgatggccgcagtgctcgttaccgtggagcttgagtgcatgcagcggttctttgctgacccggagatgcagcgcaagctagaggaaacattgcactacacctttcgacagggctacgtacgccaggcctgcaagatctccaacgtggagctctgcaacctggtctcctaccttggaattttgcacgaaaaccgccttgggcaaaacgtgcttcattccacgctcaagggcgaggcgcgccgcgactacgtccgcgactgcgtttacttatttctatgctacacctggcagacggccatgggcgtttggcagcagtgcttggaggagtgcaacctcaaggagctgcagaaactgctaaagcaaaacttgaaggacctatggacggccttcaacgagcgctccgtggccgcgcacctggcggacatcattttccccgaacgcctgcttaaaaccctgcaacagggtctgccagacttcaccagtcaaagcatgttgcagaactttaggaactttatcctagagcgctcaggaatcttgcccgccacctgctgtgcacttcctagcgactttgtgcccattaagtaccgcgaatgccctccgccgctttggggccactgctaccttctgcagctagccaactaccttgcctaccactctgacataatggaagacgtgagcggtgacggtctactggagtgtcactgtcgctgcaacctatgcaccccgcaccgctccctggtttgcaattcgcagctgcttaacgaaagtcaaattatcggtacctttgagctgcagggtccctcgcctgacgaaaagtccgcggctccggggttgaaactcactccggggctgtggacgtcggcttaccttcgcaaatttgtacctgaggactaccacgcccacgagattaggttctacgaagaccaatcccgcccgcctaatgcggagcttaccgcctgcgtcattacccagggccacattcttggccaattgcaagccatcaacaaagcccgccaagagtttctgctacgaaagggacggggggtttacttggacccccagtccggcgaggagctcaacccaatccccccgccgccgcagccctatcagcagcagccgcgggcccttgcttcccaggatggcacccaaaaagaagctgcagctgccgccgccacccacggacgaggaggaatactgggacagtcaggcagaggaggttttggacgaggaggaggaggacatgatggaagactgggagagcctagacgaggaagcttccgaggtcgaagaggtgtcagacgaaacaccgtcaccctcggtcgcattcccctcgccggcgccccagaaatcggcaaccggttccagcatggctacaacctccgctcctcaggcgccgccggcactgcccgttcgccgacccaaccgtagatgggacaccactggaaccagggccggtaagtccaagcagccgccgccgttagcccaagagcaacaacagcgccaaggctaccgctcatggcgcgggcacaagaacgccatagttgcttgcttgcaagactgtgggggcaacatctccttcgcccgccgctttcttctctaccatcacggcgtggccttcccccgtaacatcctgcattactaccgtcatctctacagcccatactgcaccggcggcagcggcagcaacagcagcggccacacagaagcaaaggcgaccggatagcaagactctgacaaagcccaagaaatccacagcggcggcagcagcaggaggaggagcgctgcgtctggcgcccaacgaacccgtatcgacccgcgagcttagaaacaggatttttcccactctgtatgctatatttcaacagagcaggggccaagaacaagagctgaaaataaaaaacaggtctctgcgatccctcacccgcagctgcctgtatcacaaaagcgaagatcagcttcggcgcacgctggaagacgcggaggctctcttcagtaaatactgcgcgctgactcttaaggactagtttcgcgccctttctcaaatttaagcgcgaaaactacgtcatctccagcggccacacccggcgccagcacctgttgtcagcgccattttttagggcggagtaacttgtatgtgttgggaattgtagttttcttaaaatgggaagtgacgtaacgtgggaaaacggaagtgacgatttgaggaagttgtgggttttttggctttcgtttctgggcgtaggttcgcgtgcggttttctgggtgttttttgtggactttaaccgttacgtcattttttagtcctatatatactcgctctgcacttggcccttttttacactgtgactgattgagctggtgccgtgtcgagtggtgtttttttaataggttttcttttttactggtaaggctgactgttatggttcttccagctcttcccgctcctcccgtgtgtgactcgcagaacgaatgtgtaggttggctgggtgtggcttattctgcggtggtggatgttatcagggcagcggcgcatgaaggagtttacatagaacccgaagccagggggcgcctggatgctttgagagagtggatatactacaactactacacagagcgatctaagcggcgagaccggagacgcagatctgtttgtcacgcccgcacctggttttgcttcaggaaatatgactacgtccggcgttccatttggcatgacactacgaccaacacgatctcggttgtctcggcgcactccgtacagtagggatcgtctacctccttttgagacagaaacccgcgctaccatactggaggatcatccgctgctgcccgaatgtaacactttgacaatgcacaacgtgagttacgtgcgaggtcttccctgcagtgtgggatttacgctgattcaggaatgggttgttccctgggatatggttctaacgcgggaggagcttgtaatcctgaggaagtgtatgcacgtgtgcctgtgttgtgccaacattgatatcatgacgagcatgatgatccatggttacgagtcctgggctctccactgtcattgttccagtcccggttccctgcagtgtatagccggcgggcaggttttggccagctggtttaggatggtggtggatggcgccatgtttaatcagaggtttatatggtaccgggaggtggtgaattacaacatgccaaaagaggtaatgtttatgtccagcgtgtttatgaggggtcgccacttaatctacctgcgcttgtggtatgatggccacgtgggttctgtggtccccgccatgagctttggatacagcgccttgcactgtgggattttgaacaatattgtggtgctgtgctgcagttactgtgctgatttaagtgagatcagggtgcgctgctgtgcccggaggacaaggcgccttatgctgcgggcggtgcgaatcatcgctgaggagaccactgccatgttgtattcctgcaggacggagcggcggcggcagcagtttattcgcgcgctgctgcagcaccaccgccctatcctgatgcacgattatgactctacccccatgtaggcgtggacttctccttcgccgcccgttaagcaaccgcaagttggacagcagcctgtggctcagcagctggacagcgacatgaacttaagtgagctgcccggggagtttattaatatcactgatgagcgtttggctcgacaggaaaccgtgtggaatataacacctaagaatatgtctgttacccatgatatgatgctttttaaggccagccggggagaaaggactgtgtactctgtgtgttgggagggaggtggcaggttgaatactagggttctgtgagtttgattaaggtacggtgatctgtataagctatgtggtggtggggctatactactgaatgaaaaatgacttgaaattttctgcaattgaaaaataaacacgttgaaacataacacaaacgattctttattcttgggcaatgtatgaaaaagtgtaagaggatgtggcaaatatttcattaatgtagttgtggccagaccagtcccatgaaaatgacatagagtatgcacttggagttgtgtctcctgtttcctgtgtaccgtttagtgtaatggttagtgttacaggtttagttttgtctccgtttaagtaaacttgactgacaatgttacttttggcagttttaccgtgagattttggataagctgataggttaggcataaatccaacagcgtttgtataggctgtcgcccctcctgacgcggtaggaggaggggagggtgccctgcatgtctgccgctgctcttgctcttgccgctgctgaggaggggggcgcatctgccgcagcaccggatgcatctgggaaaagcaaaaaaggggctcgtccctgtttccggaggaatttgcaagcggggtcttgcatgacggggaggcaaacccccgttcgccgcagtccggccggtccgagactcgaaccgggggtcccgcgactcaacccttggaaaataaccctccggctacagggagcgagccacttaatgctttcgctttccagcctaaccgcttacgctgcgcgcggccagtggccaaaaaagctagcgcagcagccgccgcgcctggaaggaagccaaaaggagcactcccccgttgtctgacgtcgcacacctgggttcgacacgcgggcggtaaccgcatggatcacggcggacggccggatacggggctcgaaccccggtcgtccgccatgatacccttgcgaatttatccaccagaccacggaagagtgcccgcttacaggctctccttttgcacggtctagagcgtcaacgattgcgcgcgcctgaccggccagagcgtcccgaccatggagcactttttgccgctgcgcaacatctggaaccgcgtccgcgactttccgcgcgcctccaccaccgccgccggcatcacctggatgtccaggtacatctacggatatggcaaacagctattatgggtattatgggtgcggccgcggatcccgggcccgtcgactgcagaggcctgcatgcaagcttggtgtaatcatggtcatagctgtttcctgtgtgaaattgttatccgctcacaattccacacaacatacgagccggaagcataaagtgtaaagcctggggtgcctaatgagtgagctaactcacattaattgcgttgcgctcactgcccgctttccagtcgggaaacctgtcgtgccagctgcattaatgaatcggccaacgcgcggggagaggcggtttgcgtattgggcgctcttccgcttcctcgctcactgactcgctgcgctcggtcgttcggctgcggcgagcggtatcagctcactcaaaggcggtaatacggttatccacagaatcaggggataacgcaggaaagaacatgtgagcaaaaggccagcaaaaggccaggaaccgtaaaaaggccgcgttgctggcgtttttccataggctccgcccccctgacgagcatcacaaaaatcgacgctcaagtcagaggtggcgaaacccgacaggactataaagataccaggcgtttccccctggaagctccctcgtgcgctctcctgttccgaccctgccgcttaccggatacctgtccgcctttctcccttcgggaagcgtggcgctttctcatagctcacgctgtaggtatctcagttcggtgtaggtcgttcgctccaagctgggctgtgtgcacgaaccccccgttcagcccgaccgctgcgccttatccggtaactatcgtcttgagtccaacccggtaagacacgacttatcgccactggcagcagccactggtaacaggattagcagagcgaggtatgtaggcggtgctacagagttcttgaagtggtggcctaactacggctacactagaagaacagtatttggtatctgcgctctgctgaagccagttaccttcggaaaaagagttggtagctcttgatccggcaaacaaaccaccgctggtagcggtggtttttttgtttgcaagcagcagattacgcgcagaaaaaaaggatctcaagaagatcctttgatcttttctacggggtctgacgctcagtggaacgaaaactcacgttaagggattttggtcatgagattatcaaaaaggatcttcacctagatccttttaaattaaaaatgaagttttaaatcaagcccaatctgaataatgttacaaccaattaaccaattctgattagaaaaactcatcgagcatcaaatgaaactgcaatttattcatatcaggattatcaataccatatttttgaaaaagccgtttctgtaatgaaggagaaaactcaccgaggcagttccataggatggcaagatcctggtatcggtctgcgattccgactcgtccaacatcaatacaacctattaatttcccctcgtcaaaaataaggttatcaagtgagaaatcaccatgagtgacgactgaatccggtgagaatggcaaaagtttatgcatttctttccagacttgttcaacaggccagccattacgctcgtcatcaaaatcactcgcatcaaccaaaccgttattcattcgtgattgcgcctgagcgagacgaaatacgcgatcgctgttaaaaggacaattacaaacaggaatcgaatgcaaccggcgcaggaacactgccagcgcatcaacaatattttcacctgaatcaggatattcttctaatacctggaatgctgtttttccggggatcgcagtggtgagtaaccatgcatcatcaggagtacggataaaatgcttgatggtcggaagaggcataaattccgtcagccagtttagtctgaccatctcatctgtaacatcattggcaacgctacctttgccatgtttcagaaacaactctggcgcatcgggcttcccatacaagcgatagattgtcgcacctgattgcccgacattatcgcgagcccatttatacccatataaatcagcatccatgttggaatttaatcgcggcctcgacgtttcccgttgaatatggctcataacaccccttgtattactgtttatgtaagcagacagttttattgttcatgatgatatatttttatcttgtgcaatgtaacatcagagattttgagacacgggccagagctgca

SEQ ID NO: 135 - DNA, 11534 bp, synthetic construct
  source 1..11534: mol_type = other DNA
tcgcgcgtttcggtgatgacggtgaaaacctctgacacatgcagctcccggagacggtcacagcttgtctgtaagcggatgccgggagcagacaagcccgtcagggcgcgtcagcgggtgttggcgggtgtcggggctggcttaactatgcggcatcagagcagattgtactgagagtgcaccatatgcggtgtgaaataccgcacagatgcgtaaggagaaaataccgcatcaggcgccattcgccattcaggctgcgcaactgttgggaagggcgatcggtgcgggcctcttcgctattacgccagctggcgaaagggggatgtgctgcaaggcgattaagttgggtaacgccagggttttcccagtcacgacgttgtaaaacgacggccagagaattctcgcgatagggataacagggtaataaataatgtactagagacactttcaataaaggcaaatgcttttatttgtacactctcgggtgattatttacccccacccttgccgtctgcgccgtttaaaaatcaaaggggttctgccgcgcatcgctatgcgccactggcagggacacgttgcgatactggtgtttagtgctccacttaaactcaggcacaaccatccgcggcagctcggtgaagttttcactccacaggctgcgcaccatcaccaacgcgtttagcaggtcgggcgccgatatcttgaagtcgcagttggggcctccgccctgcgcgcgcgagttgcgatacacagggttgcagcactggaacactatcagcgccgggtggtgcacgctggccagcacgctcttgtcggagatcagatccgcgtccaggtcctccgcgttgctcagggcgaacggagtcaactttggtagctgccttcccaaaaagggcgcgtgcccaggctttgagttgcactcgcaccgtagtggcatcaaaaggtgaccgtgcccggtctgggcgttaggatacagcgcctgcataaaagccttgatctgcttaaaagccacctgagcctttgcgccttcagagaagaacatgccgcaagacttgccggaaaactgattggccggacaggccgcgtcgtgcacgcagcaccttgcgtcggtgttggagatctgcaccacatttcggccccaccggttcttcacgatcttggccttgctagactgctccttcagcgcgcgctgcccgttttcgctcgtcacatccatttcaatcacgtgctccttatttatcataatgcttccgtgtagacacttaagctcgccttcgatctcagcgcagcggtgcagccacaacgcgcagcccgtgggctcgtgatgcttgtaggtcacctctgcaaacgactgcaggtacgcctgcaggaatcgccccatcatcgtcacaaaggtcttgttgctggtgaaggtcagctgcaacccgcggtgctcctcgttcagccaggtcttgcatacggccgccagagcttccacttggtcaggcagtagtttgaagttcgcctttagatcgttatccacgtggtacttgtccatcagcgcgcgcgcagcctccatgcccttctcccacgcagacacgatcggcacactcagcgggttcatcaccgtaatttcactttccgcttcgctgggctcttcctcttcctcttgcgtccgcataccacgcgccactgggtcgtcttcattcagccgccgcactgtgcgcttacctcctttgccatgcttgattagcaccggtgggttgctgaaacccaccatttgtagcgccacatcttctctttcttcctcgctgtccacgattacctctggtgatggcgggcgctcgggcttgggagaagggcgcttctttttcttcttgggcgcaatggccaaatccgccgccgaggtcgatggccgcgggctgggtgtgcgcggcaccagcgcgtcttgtgatgagtcttcctcgtcctcggactcgatacgccgcctcatccgcttttttgggggcgcccggggaggcggcggcgacggggacggggacgacacgtcctccatggttgggggacgtcgcgccgcaccgcgtccgcgctcgggggtggtttcgcgctgctcctcttcccgactggccatttccttctcctataggcagaaaaagatcatggagtcagtcgagaagaaggacagcctaaccgccccctctgagttcgccaccaccgcctccaccgatgccgccaacgcgcctaccaccttccccgtcgaggcacccccgcttgaggaggaggaagtgattatcgagcaggacccaggttttgtaagcgaagacgacgaggaccgctcagtaccaacagaggataaaaagcaagaccaggacaacgcagaggcaaacgaggaacaagtcgggcggggggacgaaaggcatggcgactacctagatgtgggagacgacgtgctgttgaagcatctgcagcgccagtgcgccattatctgcgacgcgttgcaagagcgcagcgatgtgcccctcgccatagcggatgtcagccttgcctacgaacgccacctattctcaccgcgcgtaccccccaaacgccaagaaaacggcacatgcgagcccaacccgcgcctcaacttctaccccgtatttgccgtgccagaggtgcttgccacctatcacatctttttccaaaactgcaagatacccctatcctgccgtgccaaccgcagccgagcggacaagcagctggccttgcggcagggcgctgtcatacctgatatcgcctcgctcaacgaagtgccaaaaatctttgagggtcttggacgcgacgagaagcgcgcggcaaacgctctgcaacaggaaaacagcgaaaatgaaagtcactctggagtgttggtggaactcgagggtgacaacgcgcgcctagccgtactaaaacgcagcatcgaggtcacccactttgcctacccggcacttaacctaccccccaaggtcatgagcacagtcatgagtgagctgatcgtgcgccgtgcgcagcccctggagagggatgcaaatttgcaagaacaaacagaggagggcctacccgcagttggcgacgagcagctagcgcgctggcttcaaacgcgcgagcctgccgacttggaggagcgacgcaaactaatgatggccgcagtgctcgttaccgtggagcttgagtgcatgcagcggttctttgctgacccggagatgcagcgcaagctagaggaaacattgcactacacctttcgacagggctacgtacgccaggcctgcaagatctccaacgtggagctctgcaacctggtctcctaccttggaattttgcacgaaaaccgccttgggcaaaacgtgcttcattccacgctcaagggcgaggcgcgccgcgactacgtccgcgactgcgtttacttatttctatgctacacctggcagacggccatgggcgtttggcagcagtgcttggaggagtgcaacctcaaggagctgcagaaactgctaaagcaaaacttgaaggacctatggacggccttcaacgagcgctccgtggccgcgcacctggcggacatcattttccccgaacgcctgcttaaaaccctgcaacagggtctgccagacttcaccagtcaaagcatgttgcagaactttaggaactttatcctagagcgctcaggaatcttgcccgccacctgctgtgcacttcctagcgactttgtgcccattaagtaccgcgaatgccctccgccgctttggggccactgctaccttctgcagctagccaactaccttgcctaccactctgacataatggaagacgtgagcggtgacggtctactggagtgtcactgtcgctgcaacctatgcaccccgcaccgctccctggtttgcaattcgcagctgcttaacgaaagtcaaattatcggtacctttgagctgcagggtccctcgcctgacgaaaagtccgcggctccggggttgaaactcactccggggctgtggacgtcggcttaccttcgcaaatttgtacctgaggactaccacgcccacgagattaggttctacgaagaccaatcccgcccgcctaatgcggagcttaccgcctgcgtcattacccagggccacattcttggccaattgcaagccatcaacaaagcccgccaagagtttctgctacgaaagggacggggggtttacttggacccccagtccggcgaggagctcaacccaatccccccgccgccgcagccctatcagcagcagccgcgggcccttgcttcccaggatggcacccaaaaagaagctgcagctgccgccgccacccacggacgaggaggaatactgggacagtcaggcagaggaggttttggacgaggaggaggaggacatgatggaagactgggagagcctagacgaggaagcttccgaggtcgaagaggtgtcagacgaaacaccgtcaccctcggtcgcattcccctcgccggcgccccagaaatcggcaaccggttccagcatggctacaacctccgctcctcaggcgccgccggcactgcccgttcgccgacccaaccgtagatgggacaccactggaaccagggccggtaagtccaagcagccgccgccgttagcccaagagcaacaacagcgccaaggctaccgctcatggcgcgggcacaagaacgccatagttgcttgcttgcaagactgtgggggcaacatctccttcgcccgccgctttcttctctaccatcacggcgtggccttcccccgtaacatcctgcattactaccgtcatctctacagcccatactgcaccggcggcagcggcagcaacagcagcggccacacagaagcaaaggcgaccggatagcaagactctgacaaagcccaagaaatccacagcggcggcagcagcaggaggaggagcgctgcgtctggcgcccaacgaacccgtatcgacccgcgagcttagaaacaggatttttcccactctgtatgctatatttcaacagagcaggggccaagaacaagagctgaaaataaaaaacaggtctctgcgatccctcacccgcagctgcctgtatcacaaaagcgaagatcagcttcggcgcacgctggaagacgcggaggctctcttcagtaaatactgcgcgctgactcttaaggactagtttcgcgccctttctcaaatttaagcgcgaaaactacgtcatctccagcggccacacccggcgccagcacctgttgtcagcgccattttttagggcggagtaacttgtatgtgttgggaattgtagttttcttaaaatgggaagtgacgtaacgtgggaaaacggaagtgacgatttgaggaagttgtgggttttttggctttcgtttctgggcgtaggttcgcgtgcggttttctgggtgttttttgtggactttaaccgttacgtcattttttagtcctatatatactcgctctgcacttggcccttttttacactgtgactgattgagctggtgccgtgtcgagtggtgtttttttaataggttttcttttttactggtaaggctgactgttatgactacgtccggcgttccatttggcatgacactacgaccaacacgatctcggttgtctcggcgcactccgtacagtagggatcgtctacctccttttgagacagaaacccgcgctaccatactggaggatcatccgctgctgcccgaatgtaacactttgacaatgcacaacgtgagttacgtgcgaggtcttccctgcagtgtgggatttacgctgattcaggaatgggttgttccctgggatatggttctaacgcgggaggagcttgtaatcctgaggaagtgtatgcacgtgtgcctgtgttgtgccaacattgatatcatgacgagcatgatgatccatggttacgagtcctgggctctccactgtcattgttccagtcccggttccctgcagtgtatagccggcgggcaggttttggccagctggtttaggatggtggtggatggcgccatgtttaatcagaggtttatatggtaccgggaggtggtgaattacaacatgccaaaagaggtaatgtttatgtccagcgtgtttatgaggggtcgccacttaatctacctgcgcttgtggtatgatggccacgtgggttctgtggtccccgccatgagctttggatacagcgccttgcactgtgggattttgaacaatattgtggtgctgtgctgcagttactgtgctgatttaagtgagatcagggtgcgctgctgtgcccggaggacaaggcgccttatgctgcgggcggtgcgaatcatcgctgaggagaccactgccatgttgtattcctgcaggacggagcggcggcggcagcagtttattcgcgcgctgctgcagcaccaccgccctatcctgatgcacgattatgactctacccccatgtaggcgtggacttctccttcgccgcccgttaagcaaccgcaagttggacagcagcctgtggctcagcagctggacagcgacatgaacttaagtgagctgcccggggagtttattaatatcactgatgagcgtttggctcgacaggaaaccgtgtggaatataacacctaagaatatgtctgttacccatgatatgatgctttttaaggccagccggggagaaaggactgtgtactctgtgtgttgggagggaggtggcaggttgaatactagggttctgtgagtttgattaaggtacggtgatctgtataagctatgtggtggtggggctatactactgaatgaaaaatgacttgaaattttctgcaattgaaaaataaacacgttgaaacataacacaaacgattctttattcttgggcaatgtatgaaaaagtgtaagaggatgtggcaaatatttcattaatgtagttgtggccagaccagtcccatgaaaatgacatagagtatgcacttggagttgtgtctcctgtttcctgtgtaccgtttagtgtaatggttagtgttacaggtttagttttgtctccgtttaagtaaacttgactgacaatgttacttttggcagttttaccgtgagattttggataagctgataggttaggcataaatccaacagcgtttgtataggctgtcgacattgattattgactagttattaatagtaatcaattacggggtcattagttcatagcccatatatggagttccgcgttacataacttacggtaaatggcccgcctggctgaccgcccaacgacccccgcccattgacgtcaataatgacgtatgttcccatagtaacgccaatagggactttccattgacgtcaatgggtggagtatttacggtaaactgcccacttggcagtacatcaagtgtatcatatgccaagtacgccccctattgacgtcaatgacggtaaatggcccgcctggcattatgcccagtacatgaccttatgggactttcctacttggcagtacatctacgtattagtcatcgctattaccatggtgatgcggttttggcagtacatcaatgggcgtggatagcggtttgactcacggggatttccaagtctccaccccattgacgtcaatgggagtttgttttggcaccaaaatcaacgggactttccaaaatgtcgtaacaactccgccccattgacgcaaatgggcggtaggcgtgtacggtgggaggtctatataagcagagctctctggctaactagagaacccactgcttactggcttatcgaaattaatacgactcactatagggagacccaagctgctggcgactcagagtcagttccagaccctcaacctctcggagaacctccagcagcgccctctggtgtgggacctaatacaatggctgcaggcggtggcgcaccaatggcagacaataacgaaggcgccgacggagtgggtagttcctcgggaaattggcattgcgattccacatggctgggcgacagagtcatcaccaccagcacccgaacctgggccctgcccacctacaacaaccacctctacaagcaaatctccaacgggacatcgggaggagccaccaacgacaacacctacttcggctacagcaccccctgggggtattttgactttaacagattccactgccacttttcaccacgtgactggcagcgactcatcaacaacaactggggattccggcccaagagactcagcttcaagctcttcaacatccaggtcaaggaggtcacgcagaatgaaggcaccaagaccatcgccaataacctcaccagcaccatccaggtgtttacggactcggagtaccagctgccgtacgttctcggctctgcccaccagggctgcctgcctccgttcccggcggacgtgttcatgaaaacccgctgatcagcctcgactgtgccttctagttgccagccatctgttgtttgcccctcccccgtgccttccttgaccctggaaggtgccactcccactgtcctttcctaataaaatgaggaaattgcatcgcattgtctgagtaggtgtcattctattctggggggtggggtggggcaggacagcaagggggaggattgggaagacaatagcaggcatgctggggatgcggtgggctctatgggcccctcctgacgcggtaggaggaggggagggtgccctgcatgtctgccgctgctcttgctcttgccgctgctgaggaggggggcgcatctgccgcagcaccggatgcatctgggaaaagcaaaaaaggggctcgtccctgtttccggaggaatttgcaagcggggtcttgcatgacggggaggcaaacccccgttcgccgcagtccggccggtccgagactcgaaccgggggtcccgcgactcaacccttggaaaataaccctccggctacagggagcgagccacttaatgctttcgctttccagcctaaccgcttacgctgcgcgcggccagtggccaaaaaagctagcgcagcagccgccgcgcctggaaggaagccaaaaggagcactcccccgttgtctgacgtcgcacacctgggttcgacacgcgggcggtaaccgcatggatcacggcggacggccggatacggggctcgaaccccggtcgtccgccatgatacccttgcgaatttatccaccagaccacggaagagtgcccgcttacaggctctccttttgcacggtctagagcgtcaacgattgcgcgcgcctgaccggccagagcgtcccgaccatggagcactttttgccgctgcgcaacatctggaaccgcgtccgcgactttccgcgcgcctccaccaccgccgccggcatcacctggatgtccaggtacatctacggatatggcaaacagctattatgggtattatgggtgcggccgcggatcccgggcccgtcgactgcagaggcctgcatgcaagcttggtgtaatcatggtcatagctgtttcctgtgtgaaattgttatccgctcacaattccacacaacatacgagccggaagcataaagtgtaaagcctggggtgcctaatgagtgagctaactcacattaattgcgttgcgctcactgcccgctttccagtcgggaaacctgtcgtgccagctgcattaatgaatcggccaacgcgcggggagaggcggtttgcgtattgggcgctcttccgcttcctcgctcactgactcgctgcgctcggtcgttcggctgcggcgagcggtatcagctcactcaaaggcggtaatacggttatccacagaatcaggggataacgcaggaaagaacatgtgagcaaaaggccagcaaaaggccaggaaccgtaaaaaggccgcgttgctggcgtttttccataggctccgcccccctgacgagcatcacaaaaatcgacgctcaagtcagaggtggcgaaacccgacaggactataaagataccaggcgtttccccctggaagctccctcgtgcgctctcctgttccgaccctgccgcttaccggatacctgtccgcctttctcccttcgggaagcgtggcgctttctcatagctcacgctgtaggtatctcagttcggtgtaggtcgttcgctccaagctgggctgtgtgcacgaaccccccgttcagcccgaccgctgcgccttatccggtaactatcgtcttgagtccaacccggtaagacacgacttatcgccactggcagcagccactggtaacaggattagcagagcgaggtatgtaggcggtgctacagagttcttgaagtggtggcctaactacggctacactagaagaacagtatttggtatctgcgctctgctgaagccagttaccttcggaaaaagagttggtagctcttgatccggcaaacaaaccaccgctggtagcggtggtttttttgtttgcaagcagcagattacgcgcagaaaaaaaggatctcaagaagatcctttgatcttttctacggggtctgacgctcagtggaacgaaaactcacgttaagggattttggtcatgagattatcaaaaaggatcttcacctagatccttttaaattaaaaatgaagttttaaatcaagcccaatctgaataatgttacaaccaattaaccaattctgattagaaaaactcatcgagcatcaaatgaaactgcaatttattcatatcaggattatcaataccatatttttgaaaaagccgtttctgtaatgaaggagaaaactcaccgaggcagttccataggatggcaagatcctggtatcggtctgcgattccgactcgtccaacatcaatacaacctattaatttcccctcgtcaaaaataaggttatcaagtgagaaatcaccatgagtgacgactgaatccggtgagaatggcaaaagtttatgcatttctttccagacttgttcaacaggccagccattacgctcgtcatcaaaatcactcgcatcaaccaaaccgttattcattcgtgattgcgcctgagcgagacgaaatacgcgatcgctgttaaaaggacaattacaaacaggaatcgaatgcaaccggcgcaggaacactgccagcgcatcaacaatattttcacctgaatcaggatattcttctaatacctggaatgctgtttttccggggatcgcagtggtgagtaaccatgcatcatcaggagtacggataaaatgcttgatggtcggaagaggcataaattccgtcagccagtttagtctgaccatctcatctgtaacatcattggcaacgctacctttgccatgtttcagaaacaactctggcgcatcgggcttcccatacaagcgatagattgtcgcacctgattgcccgacattatcgcgagcccatttatacccatataaatcagcatccatgttggaatttaatcgcggcctcgacgtttcccgttgaatatggctcataacaccccttgtattactgtttatgtaagcagacagttttattgttcatgatgatatatttttatcttgtgcaatgtaacatcagagattttgagacacgggccagagctgca

SEQ ID NO: 136 - DNA, 7929 bp, synthetic construct
  source 1..7929: mol_type = other DNA
tcgcgcgtttcggtgatgacggtgaaaacctctgacacatgcagctcccggagacggtcacagcttgtctgtaagcggatgccgggagcagacaagcccgtcagggcgcgtcagcgggtgttggcgggtgtcggggctggcttaactatgcggcatcagagcagattgtactgagagtgcaccatatgcggtgtgaaataccgcacagatgcgtaaggagaaaataccgcatcaggcgccattcgccattcaggctgcgcaactgttgggaagggcgatcggtgcgggcctcttcgctattacgccagctggcgaaagggggatgtgctgcaaggcgattaagttgggtaacgccagggttttcccagtcacgacgttgtaaaacgacggccagagaattctcgcgatagggataacagggtaataaataatgtactagagacactttcaataaaggcaaatgcttttatttgtacactctcgggtgattatttacccccacccttgccgtctgcgccgtttaaaaatcaaaggggttctgccgcgcatcgctatgcgccactggcagggacacgttgcgatactggtgtttagtgctccacttaaactcaggcacaaccatccgcggcagctcggtgaagttttcactccacaggctgcgcaccatcaccaacgcgtttagcaggtcgggcgccgatatcttgaagtcgcagttggggcctccgccctgcgcgcgcgagttgcgatacacagggttgcagcactggaacactatcagcgccgggtggtgcacgctggccagcacgctcttgtcggagatcagatccgcgtccaggtcctccgcgttgctcagggcgaacggagtcaactttggtagctgccttcccaaaaagggcgcgtgcccaggctttgagttgcactcgcaccgtagtggcatcaaaaggtgaccgtgcccggtctgggcgttaggatacagcgcctgcataaaagccttgatctgcttaaaagccacctgagcctttgcgccttcagagaagaacatgccgcaagacttgccggaaaactgattggccggacaggccgcgtcgtgcacgcagcaccttgcgtcggtgttggagatctgcaccacatttcggccccaccggttcttcacgatcttggccttgctagactgctccttcagcgcgcgctgcccgttttcgctcgtcacatccatttcaatcacgtgctccttatttatcataatgcttccgtgtagacacttaagctcgccttcgatctcagcgcagcggtgcagccacaacgcgcagcccgtgggctcgtgatgcttgtaggtcacctctgcaaacgactgcaggtacgcctgcaggaatcgccccatcatcgtcacaaaggtcttgttgctggtgaaggtcagctgcaacccgcggtgctcctcgttcagccaggtcttgcatacggccgccagagcttccacttggtcaggcagtagtttgaagttcgcctttagatcgttatccacgtggtacttgtccatcagcgcgcgcgcagcctccatgcccttctcccacgcagacacgatcggcacactcagcgggttcatcaccgtaatttcactttccgcttcgctgggctcttcctcttcctcttgcgtccgcataccacgcgccactgggtcgtcttcattcagccgccgcactgtgcgcttacctcctttgccatgcttgattagcaccggtgggttgctgaaacccaccatttgtagcgccacatcttctctttcttcctcgctgtccacgattacctctggtgatggcgggcgctcgggcttgggagaagggcgcttctttttcttcttgggcgcaatggccaaatccgccgccgaggtcgatggccgcgggctgggtgtgcgcggcaccagcgcgtcttgtgatgagtcttcctcgtcctcggactcgatacgccgcctcatccgcttttttgggggcgcccggggaggcggcggcgacggggacggggacgacacgtcctccatggttgggggacgtcgcgccgcaccgcgtccgcgctcgggggtggtttcgcgctgctcctcttcccgactggccatttccttctcctataggcagaaaaagatcgttgaaactcactccggggctgtggacgtcggcttaccttcgcaaatttgtacctgaggactaccacgcccacgagattaggttctacgaagaccaatcccgcccgcctaatgcggagcttaccgcctgcgtcattacccagggccacattcttggccaattgcaagccatcaacaaagcccgccaagagtttctgctacgaaagggacggggggtttacttggacccccagtccggcgaggagctcaacccaatccccccgccgccgcagccctatcagcagcagccgcgggcccttgcttcccaggatggcacccaaaaagaagctgcagctgccgccgccacccacggacgaggaggaatactgggacagtcaggcagaggaggttttggacgaggaggaggaggacatgatggaagactgggagagcctagacgaggaagcttccgaggtcgaagaggtgtcagacgaaacaccgtcaccctcggtcgcattcccctcgccggcgccccagaaatcggcaaccggttccagcatggctacaacctccgctcctcaggcgccgccggcactgcccgttcgccgacccaaccgtagatgggacaccactggaaccagggccggtaagtccaagcagccgccgccgttagcccaagagcaacaacagcgccaaggctaccgctcatggcgcgggcacaagaacgccatagttgcttgcttgcaagactgtgggggcaacatctccttcgcccgccgctttcttctctaccatcacggcgtggccttcccccgtaacatcctgcattactaccgtcatctctacagcccatactgcaccggcggcagcggcagcaacagcagcggccacacagaagcaaaggcgaccggatagcaagactctgacaaagcccaagaaatccacagcggcggcagcagcaggaggaggagcgctgcgtctggcgcccaacgaacccgtatcgacccgcgagcttagaaacaggatttttcccactctgtatgctatatttcaacagagcaggggccaagaacaagagctgaaaataaaaaacaggtctctgcgatccctcacccgcagctgcctgtatcacaaaagcgaagatcagcttcggcgcacgctggaagacgcggaggctctcttcagtaaatactgcgcgctgactcttaaggactagtttcgcgccctttctcaaatttaagcgcgaaaactacgtcatctccagcggccacacccggcgccagcacctgttgtcagcgccattttttagggcggagtaacttgtatgtgttgggaattgtagttttcttaaaatgggaagtgacgtaacgtgggaaaacggaagtgacgatttgaggaagttgtgggttttttggctttcgtttctgggcgtaggttcgcgtgcggttttctgggtgttttttgtggactttaaccgttacgtcattttttagtcctatatatactcgctctgcacttggcccttttttacactgtgactgattgagctggtgccgtgtcgagtggtgtttttttaataggttttcttttttactggtaaggctgactgttatgactacgtccggcgttccatttggcatgacactacgaccaacacgatctcggttgtctcggcgcactccgtacagtagggatcgtctacctccttttgagacagaaacccgcgctaccatactggaggatcatccgctgctgcccgaatgtaacactttgacaatgcacaacgtgagttacgtgcgaggtcttccctgcagtgtgggatttacgctgattcaggaatgggttgttccctgggatatggttctaacgcgggaggagcttgtaatcctgaggaagtgtatgcacgtgtgcctgtgttgtgccaacattgatatcatgacgagcatgatgatccatggttacgagtcctgggctctccactgtcattgttccagtcccggttccctgcagtgtatagccggcgggcaggttttggccagctggtttaggatggtggtggatggcgccatgtttaatcagaggtttatatggtaccgggaggtggtgaattacaacatgccaaaagaggtaatgtttatgtccagcgtgtttatgaggggtcgccacttaatctacctgcgcttgtggtatgatggccacgtgggttctgtggtccccgccatgagctttggatacagcgccttgcactgtgggattttgaacaatattgtggtgctgtgctgcagttactgtgctgatttaagtgagatcagggtgcgctgctgtgcccggaggacaaggcgccttatgctgcgggcggtgcgaatcatcgctgaggagaccactgccatgttgtattcctgcaggacggagcggcggcggcagcagtttattcgcgcgctgctgcagcaccaccgccctatcctgatgcacgattatgactctacccccatgtaggtttgattaaggtacggtgatctgtataagctatgtggtggtggggctatactactgaatgaaaaatgacttgaaattttctgcaattgaaaaataaacacgttgaaacataacacaaacgattctttattcttgggcaatgtatgaaaaagtgtaagaggatgtggcaaatatttcattaatgtagttgtggccagaccagtcccatgaaaatgacatagagtatgcacttggagttgtgtctcctgtttcctgtgtaccgtttagtgtaatggttagtgttacaggtttagttttgtctccgtttaagtaaacttgactgacaatgttacttttggcagttttaccgtgagattttggataagctgataggttaggcataaatccaacagcgtttgtataggctgtcgcccctcctgacgcggtaggaggaggggagggtgccctgcatgtctgccgctgctcttgctcttgccgctgctgaggaggggggcgcatctgccgcagcaccggatgcatctgggaaaagcaaaaaaggggctcgtccctgtttccggaggaatttgcaagcggggtcttgcatgacggggaggcaaacccccgttcgccgcagtccggccggtccgagactcgaaccgggggtcccgcgactcaacccttggaaaataaccctccggctacagggagcgagccacttaatgctttcgctttccagcctaaccgcttacgctgcgcgcggccagtggccaaaaaagctagcgcagcagccgccgcgcctggaaggaagccaaaaggagcactcccccgttgtctgacgtcgcacacctgggttcgacacgcgggcggtaaccgcatggatcacggcggacggccggatacggggctcgaaccccggtcgtccgccatgatacccttgcgaatttatccaccagaccacggaagagtgcccgcttacaggctctccttttgcacggtctagagcgtcaacgattgcgcgcgcctgaccggccagagcgtcccgaccatggagcactttttgccgctgcgcaacatctggaaccgcgtccgcgactttccgcgcgcctccaccaccgccgccggcatcacctggatgtccaggtacatctacggatatggcaaacagctattatgggtattatgggtgcggccgcggatcccgggcccgtcgactgcagaggcctgcatgcaagcttggtgtaatcatggtcatagctgtttcctgtgtgaaattgttatccgctcacaattccacacaacatacgagccggaagcataaagtgtaaagcctggggtgcctaatgagtgagctaactcacattaattgcgttgcgctcactgcccgctttccagtcgggaaacctgtcgtgccagctgcattaatgaatcggccaacgcgcggggagaggcggtttgcgtattgggcgctcttccgcttcctcgctcactgactcgctgcgctcggtcgttcggctgcggcgagcggtatcagctcactcaaaggcggtaatacggttatccacagaatcaggggataacgcaggaaagaacatgtgagcaaaaggccagcaaaaggccaggaaccgtaaaaaggccgcgttgctggcgtttttccataggctccgcccccctgacgagcatcacaaaaatcgacgctcaagtcagaggtggcgaaacccgacaggactataaagataccaggcgtttccccctggaagctccctcgtgcgctctcctgttccgaccctgccgcttaccggatacctgtccgcctttctcccttcgggaagcgtggcgctttctcatagctcacgctgtaggtatctcagttcggtgtaggtcgttcgctccaagctgggctgtgtgcacgaaccccccgttcagcccgaccgctgcgccttatccggtaactatcgtcttgagtccaacccggtaagacacgacttatcgccactggcagcagccactggtaacaggattagcagagcgaggtatgtaggcggtgctacagagttcttgaagtggtggcctaactacggctacactagaagaacagtatttggtatctgcgctctgctgaagccagttaccttcggaaaaagagttggtagctcttgatccggcaaacaaaccaccgctggtagcggtggtttttttgtttgcaagcagcagattacgcgcagaaaaaaaggatctcaagaagatcctttgatcttttctacggggtctgacgctcagtggaacgaaaactcacgttaagggattttggtcatgagattatcaaaaaggatcttcacctagatccttttaaattaaaaatgaagttttaaatcaagcccaatctgaataatgttacaaccaattaaccaattctgattagaaaaactcatcgagcatcaaatgaaactgcaatttattcatatcaggattatcaataccatatttttgaaaaagccgtttctgtaatgaaggagaaaactcaccgaggcagttccataggatggcaagatcctggtatcggtctgcgattccgactcgtccaacatcaatacaacctattaatttcccctcgtcaaaaataaggttatcaagtgagaaatcaccatgagtgacgactgaatccggtgagaatggcaaaagtttatgcatttctttccagacttgttcaacaggccagccattacgctcgtcatcaaaatcactcgcatcaaccaaaccgttattcattcgtgattgcgcctgagcgagacgaaatacgcgatcgctgttaaaaggacaattacaaacaggaatcgaatgcaaccggcgcaggaacactgccagcgcatcaacaatattttcacctgaatcaggatattcttctaatacctggaatgctgtttttccggggatcgcagtggtgagtaaccatgcatcatcaggagtacggataaaatgcttgatggtcggaagaggcataaattccgtcagccagtttagtctgaccatctcatctgtaacatcattggcaacgctacctttgccatgtttcagaaacaactctggcgcatcgggcttcccatacaagcgatagattgtcgcacctgattgcccgacattatcgcgagcccatttatacccatataaatcagcatccatgttggaatttaatcgcggcctcgacgtttcccgttgaatatggctcataacaccccttgtattactgtttatgtaagcagacagttttattgttcatgatgatatatttttatcttgtgcaatgtaacatcagagattttgagacacgggccagagctgca

SEQ ID NO: 137 - DNA, 5505 bp, synthetic construct; identical to SEQ ID NO: 106
  source 1..5505: mol_type = other DNA

SEQ ID NO: 138 - DNA, 5579 bp, synthetic construct
  source 1..5579: mol_type = other DNA
aataaaggcaaatgcttttatttgtacactctcgggtgattatttacccccacccttgccgtctgcgccgtttatcagaagtcgaaggggttctgtctggcatcggaatgggccacgggcagagacacgttccggtactggtgcttggtggaccacttgaactcaggcacgaccattctaggcagctctgtgaagttctcgctccacaggctccgcaccatcaccagggcgttcagcaggtcaggggcgctgattttgaagtcgcagttaggtccgccgccctgggctctgctgtttctgtacacagggttgcagcactggaacacaataagagcagggtggtgcacgctggccagcacagacttgtcgctgatcaggtcggcgtcgagatcctcggcgttagacaaggcaaaaggggtcagcttgggcagctggcggcccaggaaaggggcgtggccgggcttgctattgcactcgcatctcagaggcatcagcaggtggccgtggccggtctgggcgttggggtacagggcctgcataaaggccttgatctgtttgaaggccacttgggccttggcgccttcggagaagaacatgccgcagcttttgccgctgaactggttggcggggcaggcggcgtcgtgcacacaacaccgggcgtcggtattgctgatctgcaccacgtttctgccccatctgttcttcacgatcttggccttgctgctctgctctttcagggccctctggccgttctcagaggtgacgtccatctcgatcacatgttccttgttgatcatgatgctgccgtgcagacacttcagctcgccctcgatttccgcgcatctgtgcagccacagggcacaaccggtaggctcgtggtgcttgtatgtcacctcagcaaaagattgcaggtaggcttgcaggaatctgcccatcatggtcacgaaggtcttgttggaggtaaaagtcagctgcagtcctctgtgttcctcgttcagccatgtcttgcacacggcggccagagcctcgacctgatctggcagcagcttgaaattagccttcaggtcgttgtccacgtgatacttatccatcagtgctctggcggcttccatgcccttctcccaggcggaaacgatgggcacgctcagggggttcatcacggtgatctcgctttcagcttctgaaggttcctcctcttcctcctgtgttctcatgccccgagccacggggtcgtcctcattcagtctccgcacggttctttttcctccctttccgtgcttaatcagtacaggaggattagagaagcccaccatctggagggcgacgtcctccctttcttcttcgctatccacgatcacttctgggctggggggccgttcaggctttgggctaggccgtttttttttcttcttaggggcgatagccagatcagcggcgcttgtagagggccgaggactaggggttctaggcacgagggcgtcctggctgctgtcctcctcatcctcgctctcgatccgtctccgcattctcttcttagggggggcccgcggagggggagggctagggctaggggacgacacatcttccatggttggaggtctgcgagcagcgcctctgcctctctctggtgttgtctcgcgctgttcttcctctctagaggccatttccttctcctataggcagaaaaagatcgttgaaactcactccggggctgtggacgtcggcttaccttcgcaaatttgtacctgaggactaccacgcccacgagattaggttctacgaagaccaatcccgcccgcctaatgcggagcttaccgcctgcgtcattacccagggccacattcttggccaattgcaagccatcaacaaagcccgccaagagtttctgctacgaaagggacggggggtttacttggacccccagtccggcgaggagctcaacccaatccccccgccgccgcagccctatcagcagcagccgcgggcccttgcttcccaggatggcacccaaaaagaagctgcagctgccgccgccacccacggacgaggaggaatactgggacagtcaggcagaggaggttttggacgaggaggaggaggacatgatggaagactgggagagcctagacgaggaagcttccgaggtcgaagaggtgtcagacgaaacaccgtcaccctcggtcgcattcccctcgccggcgccccagaaatcggcaaccggttccagcatggctacaacctccgctcctcaggcgccgccggcactgcccgttcgccgacccaaccgtagatgggacaccactggaaccagggccggtaagtccaagcagccgccgccgttagcccaagagcaacaacagcgccaaggctaccgctcatggcgcgggcacaagaacgccatagttgcttgcttgcaagactgtgggggcaacatctccttcgcccgccgctttcttctctaccatcacggcgtggccttcccccgtaacatcctgcattactaccgtcatctctacagcccatactgcaccggcggcagcggcagcaacagcagcggccacacagaagcaaaggcgaccggatagcaagactctgacaaagcccaagaaatccacagcggcggcagcagcaggaggaggagcgctgcgtctggcgcccaacgaacccgtatcgacccgcgagcttagaaacaggatttttcccactctgtatgctatatttcaacagagcaggggccaagaacaagagctgaaaataaaaaacaggtctctgcgatccctcacccgcagctgcctgtatcacaaaagcgaagatcagcttcggcgcacgctggaagacgcggaggctctcttcagtaaatactgcgcgctgactcttaaggactagtttcgcgccctttctcaaatttaagcgcgaaaactacgtcatctccagcggccacacccggcgccagcacctgttgtcagcgccattttttagggcggagtaacttgtatgtgttgggaattgtagttttcttaaaatgggaagtgacgtaacgtgggaaaacggaagtgacgatttgaggaagttgtgggttttttggctttcgtttctgggcgtaggttcgcgtgcggttttctgggtgttttttgtggactttaaccgttacgtcattttttagtcctatatatactcgctctgcacttggcccttttttacactgtgactgattgagctggtgccgtgtcgagtggtgtttttttaataggttttcttttttactggtaaggctgactgttatgactacgtccggcgttccatttggcatgacactacgaccaacacgatctcggttgtctcggcgcactccgtacagtagggatcgtctacctccttttgagacagaaacccgcgctaccatactggaggatcatccgctgctgcccgaatgtaacactttgacaatgcacaacgtgagttacgtgcgaggtcttccctgcagtgtgggatttacgctgattcaggaatgggttgttccctgggatatggttctaacgcgggaggagcttgtaatcctgaggaagtgtatgcacgtgtgcctgtgttgtgccaacattgatatcatgacgagcatgatgatccatggttacgagtcctgggctctccactgtcattgttccagtcccggttccctgcagtgtatagccggcgggcaggttttggccagctggtttaggatggtggtggatggcgccatgtttaatcagaggtttatatggtaccgggaggtggtgaattacaacatgccaaaagaggtaatgtttatgtccagcgtgtttatgaggggtcgccacttaatctacctgcgcttgtggtatgatggccacgtgggttctgtggtccccgccatgagctttggatacagcgccttgcactgtgggattttgaacaatattgtggtgctgtgctgcagttactgtgctgatttaagtgagatcagggtgcgctgctgtgcccggaggacaaggcgccttatgctgcgggcggtgcgaatcatcgctgaggagaccactgccatgttgtattcctgcaggacggagcggcggcggcagcagtttattcgcgcgctgctgcagcaccaccgccctatcctgatgcacgattatgactctacccccatgtaggcgtggacttctccttcgccgcccgttaagcaaccgcaagttggacagcagcctgtggctcagcagctggacagcgacatgaacttaagtgagctgcccggggagtttattaatatcactgatgagcgtttggctcgacaggaaaccgtgtggaatataacacctaagaatatgtctgttacccatgatatgatgctttttaaggccagccggggagaaaggactgtgtactctgtgtgttgggagggaggtggcaggttgaatactagggttctgtgagtttgattaaggtacggtgatctgtataagctatgtggtggtggggctatactactgaatgaaaaatgacttgaaattttctgcaattgaaaaataaacacgttgaaacataacacaaacgattctttattcttgggcaatgtatgaaaaagtgtaagaggatgtggcaaatatttcattaatgtagttgtggccagaccagtcccatgaaaatgacatagagtatgcacttggagttgtgtctcctgtttcctgtgtaccgtttagtgtaatggttagtgttacaggtttagttttgtctccgtttaagtaaacttgactgacaatgttacttttggcagttttaccgtgagattttggataagctgataggttaggcataaatccaacagcgtttgtataggctgtcgcccctcctgacgcggtaggaggaggggagggtgccctgcatgtctgccgctgctcttgctcttgccgctgctgaggaggggggcgcatctgccgcagcaccggatgcatctgggaaaagcaaaaaaggggctcgtccctgtttccggaggaatttgcaagcggggtcttgcatgacggggaggcaaacccccgttcgccgcagtccggccggtccgagactcgaaccgggggtcccgcgactcaacccttggaaaataaccctccggctacagggagcgagccacttaatgctttcgctttccagcctaaccgcttacgctgcgcgcggccagtggccaaaaaagctagcgcagcagccgccgcgcctggaaggaagccaaaaggagcactcccccgttgtctgacgtcgcacacctgggttcgacacgcgggcggtaaccgcatggatcacggcggacggccggatacggggctcgaaccccggtcgtccgccatgatacccttgcgaatttatccaccagaccacggaagagtgcccgcttacaggctctccttttgcacggtctagagcgtcaacgattgcgcgcgcctgaccggccagagcgtcccgaccatggagcactttttgccgctgcgcaacatctggaaccgcgtccgcgactttccgcgcgcctccaccaccgccgccggcatcacctggatgtccaggtacatctacggata

SEQ ID NO: 139 - DNA, 8211 bp, synthetic construct
  source 1..8211: mol_type = other DNA
tgcagctctggcccgtgtctcaaaatctctgatgttacattgcacaagataaaaatatatcatcatgaacaataaaactgtctgcttacataaacagtaatacaaggggtgttatgagccatattcaacgggaaacgtcgaggccgcgattaaattccaacatggatgctgatttatatgggtataaatgggctcgcgataatgtcgggcaatcaggtgcgacaatctatcgcttgtatgggaagcccgatgcgccagagttgtttctgaaacatggcaaaggtagcgttgccaatgatgttacagatgagatggtcagactaaactggctgacggaatttatgcctcttccgaccatcaagcattttatccgtactcctgatgatgcatggttactcaccactgcgatccccggaaaaacagcattccaggtattagaagaatatcctgattcaggtgaaaatattgttgatgcgctggcagtgttcctgcgccggttgcattcgattcctgtttgtaattgtccttttaacagcgatcgcgtatttcgtctcgctcaggcgcaatcacgaatgaataacggtttggttgatgcgagtgattttgatgacgagcgtaatggctggcctgttgaacaagtctggaaagaaatgcataaacttttgccattctcaccggattcagtcgtcactcatggtgatttctcacttgataaccttatttttgacgaggggaaattaataggttgtattgatgttggacgagtcggaatcgcagaccgataccaggatcttgccatcctatggaactgcctcggtgagttttctccttcattacagaaacggctttttcaaaaatatggtattgataatcctgatatgaataaattgcagtttcatttgatgctcgatgagtttttctaatcagaattggttaattggttgtaacattattcagattgggcttgatttaaaacttcatttttaatttaaaaggatctaggtgaagatcctttttgataatctcatgaccaaaatcccttaacgtgagttttcgttccactgagcgtcagaccccgtagaaaagatcaaaggatcttcttgagatcctttttttctgcgcgtaatctgctgcttgcaaacaaaaaaaccaccgctaccagcggtggtttgtttgccggatcaagagctaccaactctttttccgaaggtaactggcttcagcagagcgcagataccaaatactgttcttctagtgtagccgtagttaggccaccacttcaagaactctgtagcaccgcctacatacctcgctctgctaatcctgttaccagtggctgctgccagtggcgataagtcgtgtcttaccgggttggactcaagacgatagttaccggataaggcgcagcggtcgggctgaacggggggttcgtgcacacagcccagcttggagcgaacgacctacaccgaactgagatacctacagcgtgagctatgagaaagcgccacgcttcccgaagggagaaaggcggacaggtatccggtaagcggcagggtcggaacaggagagcgcacgagggagcttccagggggaaacgcctggtatctttatagtcctgtcgggtttcgccacctctgacttgagcgtcgatttttgtgatgctcgtcaggggggcggagcctatggaaaaacgccagcaacgcggcctttttacggttcctggccttttgctggccttttgctcacatgttctttcctgcgttatcccctgattctgtggataaccgtattaccgcctttgagtgagctgataccgctcgccgcagccgaacgaccgagcgcagcgagtcagtgagcgaggaagcggaagagcgcccaatacgcaaaccgcctctccccgcgcgttggccgattcattaatgcagctggcacgacaggtttcccgactggaaagcgggcagtgagcgcaacgcaattaatgtgagttagctcactcattaggcaccccaggctttacactttatgcttccggctcgtatgttgtgtggaattgtgagcggataacaatttcacacaggaaacagctatgaccatgattacaccaagcttgcatgcaggcctctgcagtcgacgggcccgggatccgcggccgcacccataatacccataatagctgtttgccatatccgtagatgtacctggacatccaggtgatgccggcggcggtggtggaggcgcgcggaaagtcgcggacgcggttccagatgttgcgcagcggcaaaaagtgctccatggtcgggacgctctggccggtcaggcgcgcgcaatcgttgacgctctagaccgtgcaaaaggagagcctgtaagcgggcactcttccgtggtctggtggataaattcgcaagggtatcatggcggacgaccggggttcgagccccgtatccggccgtccgccgtgatccatgcggttaccgcccgcgtgtcgaacccaggtgtgcgacgtcagacaacgggggagtgctccttttggcttccttccaggcgcggcggctgctgcgctagcttttttggccactggccgcgcgcagcgtaagcggttaggctggaaagcgaaagcattaagtggctcgctccctgtagccggagggttattttccaagggttgagtcgcgggacccccggttcgagtctcggaccggccggactgcggcgaacgggggtttgcctccccgtcatgcaagaccccgcttgcaaattcctccggaaacagggacgagccccttttttgcttttcccagatgcatccggtgctgcggcagatgcgcccccctcctcagcagcggcaagagcaagagcagcggcagacatgcagggcaccctcccctcctcctaccgcgtcaggaggggcgacagcctatacaaacgctgttggatttatgcctaacctatcagcttatccaaaatctcacggtaaaactgccaaaagtaacattgtcagtcaagtttacttaaacggagacaaaactaaacctgtaacactaaccattacactaaacggtacacaggaaacaggagacacaactccaagtgcatactctatgtcattttcatgggactggtctggccacaactacattaatgaaatatttgccacatcctcttacactttttcatacattgcccaagaataaagaatcgtttgtgttatgtttcaacgtgtttatttttcaattgcagaaaatttcaagtcatttttcattcagtagtatagccccaccaccacatagcttatacagatcaccgtaccttaatcaaactcacagaaccctagtattcaacctgccacctccctcccaacacacagagtacacagtcctttctccccggctggccttaaaaagcatcatatcatgggtaacagacatattcttaggtgttatattccacacggtttcctgtcgagccaaacgctcatcagtgatattaataaactccccgggcagctcacttaagttcatgtcgctgtccagctgctgagccacaggctgctgtccaacttgcggttgcttaacgggcggcgaaggagaagtccacgcctacatgggggtagagtcataatcgtgcatcaggatagggcggtggtgctgcagcagcgcgcgaataaactgctgccgccgccgctccgtcctgcaggaatacaacatggcagtggtctcctcagcgatgattcgcaccgcccgcagcataaggcgccttgtcctccgggcacagcagcgcaccctgatctcacttaaatcagcacagtaactgcagcacagcaccacaatattgttcaaaatcccacagtgcaaggcgctgtatccaaagctcatggcggggaccacagaacccacgtggccatcataccacaagcgcaggtagattaagtggcgacccctcataaacacgctggacataaacattacctcttttggcatgttgtaattcaccacctcccggtaccatataaacctctgattaaacatggcgccatccaccaccatcctaaaccagctggccaaaacctgcccgccggctatacactgcagggaaccgggactggaacaatgacagtggagagcccaggactcgtaaccatggatcatcatgctcgtcatgatatcaatgttggcacaacacaggcacacgtgcatacacttcctcaggattacaagctcctcccgcgttagaaccatatcccagggaacaacccattcctgaatcagcgtaaatcccacactgcagggaagacctcgcacgtaactcacgttgtgcattgtcaaagtgttacattcgggcagcagcggatgatcctccagtatggtagcgcgggtttctgtctcaaaaggaggtagacgatccctactgtacggagtgcgccgagacaaccgagatcgtgttggtcgtagtgtcatgccaaatggaacgccggacgtagtcataacagtcagccttaccagtaaaaaagaaaacctattaaaaaaacaccactcgacacggcaccagctcaatcagtcacagtgtaaaaaagggccaagtgcagagcgagtatatataggactaaaaaatgacgtaacggttaaagtccacaaaaaacacccagaaaaccgcacgcgaacctacgcccagaaacgaaagccaaaaaacccacaacttcctcaaatcgtcacttccgttttcccacgttacgtcacttcccattttaagaaaactacaattcccaacacatacaagttactccgccctaaaaaatggcgctgacaacaggtgctggcgccgggtgtggccgctggagatgacgtagttttcgcgcttaaatttgagaaagggcgcgaaactagtccttaagagtcagcgcgcagtatttactgaagagagcctccgcgtcttccagcgtgcgccgaagctgatcttcgcttttgtgatacaggcagctgcgggtgagggatcgcagagacctgttttttattttcagctcttgttcttggcccctgctctgttgaaatatagcatacagagtgggaaaaatcctgtttctaagctcgcgggtcgatacgggttcgttgggcgccagacgcagcgctcctcctcctgctgctgccgccgctgtggatttcttgggctttgtcagagtcttgctatccggtcgcctttgcttctgtgtggccgctgctgttgctgccgctgccgccggtgcagtatgggctgtagagatgacggtagtaatgcaggatgttacgggggaaggccacgccgtgatggtagagaagaaagcggcgggcgaaggagatgttgcccccacagtcttgcaagcaagcaactatggcgttcttgtgcccgcgccatgagcggtagccttggcgctgttgttgctcttgggctaacggcggcggctgcttggacttaccggccctggttccagtggtgtcccatctacggttgggtcggcgaacgggcagtgccggcggcgcctgaggagcggaggttgtagccatgctggaaccggttgccgatttctggggcgccggcgaggggaatgcgaccgagggtgacggtgtttcgtctgacacctcttcgacctcggaagcttcctcgtctaggctctcccagtcttccatcatgtcctcctcctcctcgtccaaaacctcctctgcctgactgtcccagtattcctcctcgtccgtgggtggcggcggcagctgcagcttctttttgggtgccatcctgggaagcaagggcccgcggctgctgctgatagggctgcggcggcggggggattgggttgagctcctcgccggactgggggtccaagtaaaccccccgtccctttcgtagcagaaactcttggcgggctttgttgatggcttgcaattggccaagaatgtggccctgggtaatgacgcaggcggtaagctccgcattaggcgggcgggattggtcttcgtagaacctaatctcgtgggcgtggtagtcctcaggtacaaatttgcgaaggtaagccgacgtccacagccccggagtgagtttcaacgatctttttctgcctataggagaaggaaatggcctctagagaggaagaacagcgcgagacaacaccagagagaggcagaggcgctgctcgcagacctccaaccatggaagatgtgtcgtcccctagccctagccctccccctccgcgggccccccctaagaagagaatgcggagacggatcgagagcgaggatgaggaggacagcagccaggacgccctcgtgcctagaacccctagtcctcggccctctacaagcgccgctgatctggctatcgcccctaagaagaaaaaaaaacggcctagcccaaagcctgaacggccccccagcccagaagtgatcgtggatagcgaagaagaaagggaggacgtcgccctccagatggtgggcttctctaatcctcctgtactgattaagcacggaaagggaggaaaaagaaccgtgcggagactgaatgaggacgaccccgtggctcggggcatgagaacacaggaggaagaggaggaaccttcagaagctgaaagcgagatcaccgtgatgaaccccctgagcgtgcccatcgtttccgcctgggagaagggcatggaagccgccagagcactgatggataagtatcacgtggacaacgacctgaaggctaatttcaagctgctgccagatcaggtcgaggctctggccgccgtgtgcaagacatggctgaacgaggaacacagaggactgcagctgacttttacctccaacaagaccttcgtgaccatgatgggcagattcctgcaagcctacctgcaatcttttgctgaggtgacatacaagcaccacgagcctaccggttgtgccctgtggctgcacagatgcgcggaaatcgagggcgagctgaagtgtctgcacggcagcatcatgatcaacaaggaacatgtgatcgagatggacgtcacctctgagaacggccagagggccctgaaagagcagagcagcaaggccaagatcgtgaagaacagatggggcagaaacgtggtgcagatcagcaataccgacgcccggtgttgtgtgcacgacgccgcctgccccgccaaccagttcagcggcaaaagctgcggcatgttcttctccgaaggcgccaaggcccaagtggccttcaaacagatcaaggcctttatgcaggccctgtaccccaacgcccagaccggccacggccacctgctgatgcctctgagatgcgagtgcaatagcaagcccggccacgcccctttcctgggccgccagctgcccaagctgaccccttttgccttgtctaacgccgaggatctcgacgccgacctgatcagcgacaagtctgtgctggccagcgtgcaccaccctgctcttattgtgttccagtgctgcaaccctgtgtacagaaacagcagagcccagggcggcggacctaactgcgacttcaaaatcagcgcccctgacctgctgaacgccctggtgatggtgcggagcctgtggagcgagaacttcacagagctgcctagaatggtcgtgcctgagttcaagtggtccaccaagcaccagtaccggaacgtgtctctgcccgtggcccattccgatgccagacagaaccccttcgacttctgataaacggcgcagacggcaagggtgggggtaaataatcacccgagagtgtacaaataaaagcatttgcctttattgaaagtgtctctagtacattatttattaccctgttatccctatcgcgagaattctctggccgtcgttttacaacgtcgtgactgggaaaaccctggcgttacccaacttaatcgccttgcagcacatccccctttcgccagctggcgtaatagcgaagaggcccgcaccgatcgcccttcccaacagttgcgcagcctgaatggcgaatggcgcctgatgcggtattttctccttacgcatctgtgcggtatttcacaccgcatatggtgcactctcagtacaatctgctctgatgccgcatagttaagccagccccgacacccgccaacacccgctgacgcgccctgacgggcttgtctgctcccggcatccgcttacagacaagctgtgaccgtctccgggagctgcatgtgtcagaggttttcaccgtcatcaccgaaacgcgcga

SEQ ID NO: 140 - DNA, 7331 bp, synthetic construct; identical to SEQ ID NO: 10
  source 1..7331: mol_type = other DNA

SEQ ID NO: 141 - DNA, 5505 bp, synthetic construct; identical to SEQ ID NO: 25
  source 1..5505: mol_type = other DNA

SEQ ID NO: 142 - DNA, 5505 bp, synthetic construct; identical to SEQ ID NO: 25
  source 1..5505: mol_type = other DNA

SEQ ID NO: 143 - DNA, 5638 bp, synthetic construct
  source 1..5638: mol_type = other DNA
ttaaaaatcaaaggggttctgccgcgcatcgctatgcgccactggcagggacacgttgcgatactggtgtttagtgctccacttaaactcaggcacaaccatccgcggcagctcggtgaagttttcactccacaggctgcgcaccatcaccaacgcgtttagcaggtcgggcgccgatatcttgaagtcgcagttggggcctccgccctgcgcgcgcgagttgcgatacacagggttgcagcactggaacactatcagcgccgggtggtgcacgctggccagcacgctcttgtcggagatcagatccgcgtccaggtcctccgcgttgctcagggcgaacggagtcaactttggtagctgccttcccaaaaagggcgcgtgcccaggctttgagttgcactcgcaccgtagtggcatcaaaaggtgaccgtgcccggtctgggcgttaggatacagcgcctgcataaaagccttgatctgcttaaaagccacctgagcctttgcgccttcagagaagaacatgccgcaagacttgccggaaaactgattggccggacaggccgcgtcgtgcacgcagcaccttgcgtcggtgttggagatctgcaccacatttcggccccaccggttcttcacgatcttggccttgctagactgctccttcagcgcgcgctgcccgttttcgctcgtcacatccatttcaatcacgtgctccttatttatcataatgcttccgtgtagacacttaagctcgccttcgatctcagcgcagcggtgcagccacaacgcgcagcccgtgggctcgtgatgcttgtaggtcacctctgcaaacgactgcaggtacgcctgcaggaatcgccccatcatcgtcacaaaggtcttgttgctggtgaaggtcagctgcaacccgcggtgctcctcgttcagccaggtcttgcatacggccgccagagcttccacttggtcaggcagtagtttgaagttcgcctttagatcgttatccacgtggtacttgtccatcagcgcgcgcgcagcctccatgcccttctcccacgcagacacgatcggcacactcagcgggttcatcaccgtaatttcactttccgcttcgctgggctcttcctcttcctcttgcgtccgcataccacgcgccactgggtcgtcttcattcagccgccgcactgtgcgcttacctcctttgccatgcttgattagcaccggtgggttgctgaaacccaccatttgtagcgccacatcttctctttcttcctcgctgtccacgattacctctggtgatggcgggcgctcgggcttgggagaagggcgcttctttttcttcttgggcgcaatggccaaatccgccgccgaggtcgatggccgcgggctgggtgtgcgcggcaccagcgcgtcttgtgatgagtcttcctcgtcctcggactcgatacgccgcctcatccgcttttttgggggcgcccggggaggcggcggcgacggggacggggacgacacgtcctccatggttgggggacgtcgcgccgcaccgcgtccgcgctcgggggtggtttcgcgctgctcctcttcccgactggccatttccttctcctataggcagaaaaagatcgttgaaactcactccggggctgtggacgtcggcttaccttcgcaaatttgtacctgaggactaccacgcccacgagattaggttctacgaagaccaatcccgcccgcctaatgcggagcttaccgcctgcgtcattacccagggccacattcttggccaattgcaagccatcaacaaagcccgccaagagtttctgctacgaaagggacggggggtttacttggacccccagtccggcgaggagctcaacccaatccccccgccgccgcagccctatcagcagcagccgcgggcccttgcttcccaggatggcacccaaaaagaagctgcagctgccgccgccacccacggacgaggaggaatactgggacagtcaggcagaggaggttttggacgaggaggaggaggacatgatggaagactgggagagcctagacgaggaagcttccgaggtcgaagaggtgtcagacgaaacaccgtcaccctcggtcgcattcccctcgccggcgccccagaaatcggcaaccggttccagcatggctacaacctccgctcctcaggcgccgccggcactgcccgttcgccgacccaaccgtagatgggacaccactggaaccagggccggtaagtccaagcagccgccgccgttagcccaagagcaacaacagcgccaaggctaccgctcatggcgcgggcacaagaacgccatagttgcttgcttgcaagactgtgggggcaacatctccttcgcccgccgctttcttctctaccatcacggcgtggccttcccccgtaacatcctgcattactaccgtcatctctacagcccatactgcaccggcggcagcggcagcaacagcagcggccacacagaagcaaaggcgaccggatagcaagactctgacaaagcccaagaaatccacagcggcggcagcagcaggaggaggagcgctgcgtctggcgcccaacgaacccgtatcgacccgcgagcttagaaacaggatttttcccactctgtatgctatatttcaacagagcaggggccaagaacaagagctgaaaataaaaaacaggtctctgcgatccctcacccgcagctgcctgtatcacaaaagcgaagatcagcttcggcgcacgctggaagacgcggaggctctcttcagtaaatactgcgcgctgactcttaaggactagtttcgcgccctttctcaaatttaagcgcgaaaactacgtcatctccagcggccacacccggcgccagcacctgttgtcagcgccattttttagggcggagtaacttgtatgtgttgggaattgtagttttcttaaaatgggaagtgacgtaacgtgggaaaacggaagtgacgatttgaggaagttgtgggttttttggctttcgtttctgggcgtaggttcgcgtgcggttttctgggtgttttttgtggactttaaccgttacgtcattttttagtcctatatatactcgctctgcacttggcccttttttacactgtgactgattgagctggtgccgtgtcgagtggtgtttttttaataggttttcttttttactggtaaggctgactgttatgactacgtccggcgttccatttggcatgacactacgaccaacacgatctcggttgtctcggcgcactccgtacagtagggatcgtctacctccttttgagacagaaacccgcgctaccatactggaggatcatccgctgctgcccgaatgtaacactttgacaatgcacaacgtgagttacgtgcgaggtcttccctgcagtgtgggatttacgctgattcaggaatgggttgttccctgggatatggttctaacgcgggaggagcttgtaatcctgaggaagtgtatgcacgtgtgcctgtgttgtgccaacattgatatcatgacgagcatgatgatccatggttacgagtcctgggctctccactgtcattgttccagtcccggttccctgcagtgtatagccggcgggcaggttttggccagctggtttaggatggtggtggatggcgccatgtttaatcagaggtttatatggtaccgggaggtggtgaattacaacatgccaaaagaggtaatgtttatgtccagcgtgtttatgaggggtcgccacttaatctacctgcgcttgtggtatgatggccacgtgggttctgtggtccccgccatgagctttggatacagcgccttgcactgtgggattttgaacaatattgtggtgctgtgctgcagttactgtgctgatttaagtgagatcagggtgcgctgctgtgcccggaggacaaggcgccttatgctgcgggcggtgcgaatcatcgctgaggagaccactgccatgttgtattcctgcaggacggagcggcggcggcagcagtttattcgcgcgctgctgcagcaccaccgccctatcctgatgcacgattatgactctacccccatgtaggcgtggacttctccttcgccgcccgttaagcaaccgcaagttggacagcagcctgtggctcagcagctggacagcgacatgaacttaagtgagctgcccggggagtttattaatatcactgatgagcgtttggctcgacaggaaaccgtgtggaatataacacctaagaatatgtctgttacccatgatatgatgctttttaaggccagccggggagaaaggactgtgtactctgtgtgttgggagggaggtggcaggttgaatactagggttctgtgagtttgattaaggtacggtgatctgtataagctatgtggtggtggggctatactactgaatgaaaaatgacttgaaattttctgcaattgaaaaataaacacgttgaaacataacacaaacgattctttattcttgggcaatgtatgaaaaagtgtaagaggatgtggcaaatatttcattaatgtagttgtggccagaccagtcccatgaaaatgacatagagtaaggtcctgtattagaggtcacgtgagtgttttgcgacattttgcgacaccatgtggtcacgctgggtatttaagcccgagtgagcacgcagggtctccattttgaagcgggaggtttgaacgcgcagccgccatgcacttggagttgtgtctcctgtttcctgtgtaccgtttagtgtaatggttagtgttacaggtttagttttgtctccgtttaagtaaacttgactgacaatgttacttttggcagttttaccgtgagattttggataagctgataggttaggcataaatccaacagcgtttgtataggctgtcgcccctcctgacgcggtaggaggaggggagggtgccctgcatgtctgccgctgctcttgctcttgccgctgctgaggaggggggcgcatctgccgcagcaccggatgcatctgggaaaagcaaaaaaggggctcgtccctgtttccggaggaatttgcaagcggggtcttgcatgacggggaggcaaacccccgttcgccgcagtccggccggtccgagactcgaaccgggggtcccgcgactcaacccttggaaaataaccctccggctacagggagcgagccacttaatgctttcgctttccagcctaaccgcttacgctgcgcgcggccagtggccaaaaaagctagcgcagcagccgccgcgcctggaaggaagccaaaaggagcactcccccgttgtctgacgtcgcacacctgggttcgacacgcgggcggtaaccgcatggatcacggcggacggccggatacggggctcgaaccccggtcgtccgccatgatacccttgcgaatttatccaccagaccacggaagagtgcccgcttacaggctctccttttgcacggtctagagcgtcaacgattgcgcgcgcctgaccggccagagcgtcccgaccatggagcactttttgccgctgcgcaacatctggaaccgcgtccgcgactttccgcgcgcctccaccaccgccgccggcatcacctggatgtccaggtacatctacggata

SEQ ID NO: 144 - DNA, 5505 bp, synthetic construct; identical to SEQ ID NO: 25
  source 1..5505: mol_type = other DNA

SEQ ID NO: 145 - DNA, 5505 bp, synthetic construct; identical to SEQ ID NO: 106
  source 1..5505: mol_type = other DNA

SEQ ID NO: 146 - DNA, 5505 bp, synthetic construct; identical to SEQ ID NO: 106
  source 1..5505: mol_type = other DNA

SEQ ID NO: 147 - DNA, 5505 bp, synthetic construct; identical to SEQ ID NO: 106
  source 1..5505: mol_type = other DNA

SEQ ID NO: 148 - DNA, 5505 bp, synthetic construct; identical to SEQ ID NO: 106
  source 1..5505: mol_type = other DNA

SEQ ID NO: 149 - DNA, 5505 bp, synthetic construct; identical to SEQ ID NO: 25
  source 1..5505: mol_type = other DNA

SEQ ID NO: 150 - DNA, 5505 bp, synthetic construct; identical to SEQ ID NO: 25
  source 1..5505: mol_type = other DNA

SEQ ID NO: 151 - DNA, 5505 bp, synthetic construct; identical to SEQ ID NO: 25
  source 1..5505: mol_type = other DNA

SEQ ID NO: 152 - DNA, 5505 bp, synthetic construct; identical to SEQ ID NO: 25
  source 1..5505: mol_type = other DNA

SEQ ID NO: 153 - DNA, 5505 bp, synthetic construct; identical to SEQ ID NO: 25
  source 1..5505: mol_type = other DNA

SEQ ID NO: 154 - DNA, 5505 bp, synthetic construct; identical to SEQ ID NO: 25
  source 1..5505: mol_type = other DNA

SEQ ID NO: 155 - DNA, 5505 bp, synthetic construct; identical to SEQ ID NO: 25
  source 1..5505: mol_type = other DNA

SEQ ID NO: 156 - DNA, 5226 bp, synthetic construct; identical to SEQ ID NO: 130
  source 1..5226: mol_type = other DNA

SEQ ID NO: 157 - DNA, 5226 bp, synthetic construct; identical to SEQ ID NO: 130
  source 1..5226: mol_type = other DNA

SEQ ID NO: 158 - DNA, 5226 bp, synthetic construct
  source 1..5226: mol_type = other DNA
tcagaagtcgaaggggttctgtctggcatcggaatgggccacgggcagagacacgttccggtactggtgcttggtggaccacttgaactcaggcacgaccattctaggcagctctgtgaagttctcgctccacaggctccgcaccatcaccagggcgttcagcaggtcaggggcgctgattttgaagtcgcagttaggtccgccgccctgggctctgctgtttctgtacacagggttgcagcactggaacacaataagagcagggtggtgcacgctggccagcacagacttgtcgctgatcaggtcggcgtcgagatcctcggcgttagacaaggcaaaaggggtcagcttgggcagctggcggcccaggaaaggggcgtggccgggcttgctattgcactcgcatctcagaggcatcagcaggtggccgtggccggtctgggcgttggggtacagggcctgcataaaggccttgatctgtttgaaggccacttgggccttggcgccttcggagaagaacatgccgcagcttttgccgctgaactggttggcggggcaggcggcgtcgtgcacacaacaccgggcgtcggtattgctgatctgcaccacgtttctgccccatctgttcttcacgatcttggccttgctgctctgctctttcagggccctctggccgttctcagaggtgacgtccatctcgatcacatgttccttgttgatcatgatgctgccgtgcagacacttcagctcgccctcgatttccgcgcatctgtgcagccacagggcacaaccggtaggctcgtggtgcttgtatgtcacctcagcaaaagattgcaggtaggcttgcaggaatctgcccatcatggtcacgaaggtcttgttggaggtaaaagtcagctgcagtcctctgtgttcctcgttcagccatgtcttgcacacggcggccagagcctcgacctgatctggcagcagcttgaaattagccttcaggtcgttgtccacgtgatacttatccatcagtgctctggcggcttccatgcccttctcccaggcggaaacgatgggcacgctcagggggttcatcacggtgatctcgctttcagcttctgaaggttcctcctcttcctcctgtgttctcatgccccgagccacggggtcgtcctcattcagtctccgcacggttctttttcctccctttccgtgcttaatcagtacaggaggattagagaagcccaccatctggagggcgacgtcctccctttcttcttcgctatccacgatcacttctgggctggggggccgttcaggctttgggctaggccgtttttttttcttcttaggggcgatagccagatcagcggcgcttgtagagggccgaggactaggggttctaggcacgagggcgtcctggctgctgtcctcctcatcctcgctctcgatccgtctccgcattctcttcttagggggggcccgcggagggggagggctagggctaggggacgacacatcttccatggttggaggtctgcgagcagcgcctctgcctctctctggtgttgtctcgcgctgttcttcctctctagaggccatttccttctcctataggcagaaaaagatcgttgaaactcactccggggctgtggacgtcggcttaccttcgcaaatttgtacctgaggactaccacgcccacgagattaggttctacgaagaccaatcccgcccgcctaatgcggagcttaccgcctgcgtcattacccagggccacattcttggccaattgcaagccatcaacaaagcccgccaagagtttctgctacgaaagggacggggggtttacttggacccccagtccggcgaggagctcaacccaatccccccgccgccgcagccctatcagcagcagccgcgggcccttgcttcccaggatggcacccaaaaagaagctgcagctgccgccgccacccacggacgaggaggaatactgggacagtcaggcagaggaggttttggacgaggaggaggaggacatgatggaagactgggagagcctagacgaggaagcttccgaggtcgaagaggtgtcagacgaaacaccgtcaccctcggtcgcattcccctcgccggcgccccagaaatcggcaaccggttccagcatggctacaacctccgctcctcaggcgccgccggcactgcccgttcgccgacccaaccgtagatgggacaccactggaaccagggccggtaagtccaagcagccgccgccgttagcccaagagcaacaacagcgccaaggctaccgctcatggcgcgggcacaagaacgccatagttgcttgcttgcaagactgtgggggcaacatctccttcgcccgccgctttcttctctaccatcacggcgtggccttcccccgtaacatcctgcattactaccgtcatctctacagcccatactgcaccggcggcagcggcagcaacagcagcggccacacagaagcaaaggcgaccggatagcaagactctgacaaagcccaagaaatccacagcggcggcagcagcaggaggaggagcgctgcgtctggcgcccaacgaacccgtatcgacccgcgagcttagaaacaggatttttcccactctgtatgctatatttcaacagagcaggggccaagaacaagagctgaaaataaaaaacaggtctctgcgatccctcacccgcagctgcctgtatcacaaaagcgaagatcagcttcggcgcacgctggaagacgcggaggctctcttcagtaaatactgcgcgctgactcttaaggactagtttcgcgccctttctcaaatttaagcgcgaaaactacgtcatctccagcggccacacccggcgccagcacctgttgtcagcgccattttttagggcggagtaacttgtatgtgttgggaattgtagttttcttaaaatgggaagtgacgtaacgtgggaaaacggaagtgacgatttgaggaagttgtgggttttttggctttcgtttctgggcgtaggttcgcgtgcggttttctgggtgttttttgtggactttaaccgttacgtcattttttagtcctatatatactcgctctgcacttggcccttttttacactgtgactgattgagctggtgccgtgtcgagtggtgtttttttaataggttttcttttttactggtaaggctgactgttatgactacgtccggcgttccatttggcatgacactacgaccaacacgatctcggttgtctcggcgcactccgtacagtagggatcgtctacctccttttgagacagaaacccgcgctaccatactggaggatcatccgctgctgcccgaatgtaacactttgacaatgcacaacgtgagttacgtgcgaggtcttccctgcagtgtgggatttacgctgattcaggaatgggttgttccctgggatatggttctaacgcgggaggagcttgtaatcctgaggaagtgtatgcacgtgtgcctgtgttgtgccaacattgatatcatgacgagcatgatgatccatggttacgagtcctgggctctccactgtcattgttccagtcccggttccctgcagtgtatagccggcgggcaggttttggccagctggtttaggatggtggtggatggcgccatgtttaatcagaggtttatatggtaccgggaggtggtgaattacaacatgccaaaagaggtaatgtttatgtccagcgtgtttatgaggggtcgccacttaatctacctgcgcttgtggtatgatggccacgtgggttctgtggtccccgccatgagctttggatacagcgccttgcactgtgggattttgaacaatattgtggtgctgtgctgcagttactgtgctgatttaagtgagatcagggtgcgctgctgtgcccggaggacaaggcgccttatgctgcgggcggtgcgaatcatcgctgaggagaccactgccatgttgtattcctgcaggacggagcggcggcggcagcagtttattcgcgcgctgctgcagcaccaccgccctatcctgatgcacgattatgactctacccccatgtaggtttgattaaggtacggtgatctgtataagctatgtggtggtggggctatactactgaatgaaaaatgacttgaaattttctgcaattgaaaaataaacacgttgaaacataacacaaacgattctttattcttgggcaatgtatgaaaaagtgtaagaggatgtggcaaatatttcattaatgtagttgtggccagaccagtcccatgaaaatgacatagagtatgcacttggagttgtgtctcctgtttcctgtgtaccgtttagtgtaatggttagtgttacaggtttagttttgtctccgtttaagtaaacttgactgacaatgttacttttggcagttttaccgtgagattttggataagctgataggttaggcataaatccaacagcgtttgtataggctgtcgcccctcctgacgcggtaggaggaggggagggtgccctgcatgtctgccgctgctcttgctcttgccgctgctgaggaggggggcgcatctgccgcagcaccggatgcatctgggaaaagcaaaaaaggggctcgtccctgtttccggaggaatttgcaagcggggtcttgcatgacggggaggcaaacccccgttcgccgcagtccggccggtccgagactcgaaccgggggtcccgcgactcaacccttggaaaataaccctccggctacagggagcgagccacttaatgctttcgctttccagcctaaccgcttacgctgcgcgcggccagtggccaaaaaagctagcgcagcagccgccgcgcctggaaggaagccaaaaggagcactcccccgttgtctgacgtcgcacacctgggttcgacacgcgggcggtaaccgcatggatcacggcggacggccggatacggggctcgaaccccggtcgtccgccatgatacccttgcgaatttatccaccagaccacggaagagtgcccgcttacaggctctccttttgcacggtctagagcgtcaacgattgcgcgcgcctgaccggccagagcgtcccgaccatggagcactttttgccgctgcgcaacatctggaaccgcgtccgcgactttccgcgcgcctccaccaccgccgccggcatcacctggatgtccaggtacatctacggata

SEQ ID NO: 159 - DNA, 9546 bp, synthetic construct
  source 1..9546: mol_type = other DNA
atgccggggttttacgagattgtgattaaggtccccagcgaccttgacgagcatctgcccggcatttctgacagctttgtgaactgggtggccgagaaggaatgggagttgccgccagattctgacatggatctgaatctgattgagcaggcacccctgaccgtggccgagaagctgcagcgcgactttctgacggaatggcgccgtgtgagtaaggccccggaggctcttttctttgtgcaatttgagaagggagagagctacttccacatgcacgtgctcgtggaaaccaccggggtgaaatccatggttttgggacgtttcctgagtcagattcgcgaaaaactgattcagagaatttaccgcgggatcgagccgactttgccaaactggttcgcggtcacaaagaccagaaatggcgccggaggcgggaacaaggtggtggatgagtgctacatccccaattacttgctccccaaaacccagcctgagctccagtgggcgtggactaatatggaacagtatttaagcgcctgtttgaatctcacggagcgtaaacggttggtggcgcagcatctgacgcacgtgtcgcagacgcaggagcagaacaaagagaatcagaatcccaattctgatgcgccggtgatcagatcaaaaacttcagccaggtacatggagctggtcgggtggctcgtggacaaggggattacctcggagaagcagtggatccaggaggaccaggcctcatacatctccttcaatgcggcctccaactcgcggtcccaaatcaaggctgccttggacaatgcgggaaagattatgagcctgactaaaaccgcccccgactacctggtgggccagcagcccgtggaggacatttccagcaatcggatttataaaattttggaactaaacgggtacgatccccaatatgcggcttccgtctttctgggatgggccacgaaaaagttcggcaagaggaacaccatctggctgtttgggcctgcaactaccgggaagaccaacatcgcggaggccatagcccacactgtgcccttctacgggtgcgtaaactggaccaatgagaactttcccttcaacgactgtgtcgacaagatggtgatctggtgggaggaggggaagatgaccgccaaggtcgtggagtcggccaaagccattctcggaggaagcaaggtgcgcgtggaccagaaatgcaagtcctcggcccagatagacccgactcccgtgatcgtcacctccaacaccaacatgtgcgccgtgattgacgggaactcaacgaccttcgaacaccagcagccgttgcaagaccggatgttcaaatttgaactcacccgccgtctggatcatgactttgggaaggtcaccaagcaggaagtcaaagactttttccggtgggcaaaggatcacgtggttgaggtggagcatgaattctacgtcaaaaagggtggagccaagaaaagacccgcccccagtgacgcagatataagtgagcccaaacgggtgcgcgagtcagttgcgcagccatcgacgtcagacgcggaagcttcgatcaactacgcagacaggtaccaaaacaaatgttctcgtcacgtgggcatgaatctgatgctgtttccctgcagacaatgcgagagaatgaatcagaattcaaatatctgcttcactcacggacagaaagactgtttagagtgctttcccgtgtcagaatctcaacccgtttctgtcgtcaaaaaggcgtatcagaaactgtgctacattcatcatatcatgggaaaggtgccagacgcttgcactgcctgcgatctggtcaatgtggatttggatgactgcatctttgaacaataaatgatttaaatcaggtatggctgccgatggttatcttccagattggctcgaggacaacctctctgagggcattcgcgagtggtgggcgctgaaacctggagccccgaagcccaaagccaaccagcaaaagcaggacgacggccggggtctggtgcttcctggctacaagtacctcggacccttcaacggactcgacaagggggagcccgtcaacgcggcggacgcagcggccctcgagcacgacaaggcctacgaccagcagctgcaggcgggtgacaatccgtacctgcggtataaccacgccgacgccgagtttcaggagcgtctgcaagaagatacgtcttttgggggcaacctcgggcgagcagtcttccaggccaagaagcgggttctcgaacctctcggtctggttgaggaaggcgctaagacggctcctggaaagaagagaccggtagagccatcaccccagcgttctccagactcctctacgggcatcggcaagaaaggccaacagcccgccagaaaaagactcaattttggtcagactggcgactcagagtcagttccagaccctcaacctctcggagaacctccagcagcgccctctggtgtgggacctaatacaatggctgcaggcggtggcgcaccaatggcagacaataacgaaggcgccgacggagtgggtagttcctcgggaaattggcattgcgattccacatggctgggcgacagagtcatcaccaccagcacccgaacctgggccctgcccacctacaacaaccacctctacaagcaaatctccaacgggacatcgggaggagccaccaacgacaacacctacttcggctacagcaccccctgggggtattttgactttaacagattccactgccacttttcaccacgtgactggcagcgactcatcaacaacaactggggattccggcccaagagactcagcttcaagctcttcaacatccaggtcaaggaggtcacgcagaatgaaggcaccaagaccatcgccaataacctcaccagcaccatccaggtgtttacggactcggagtaccagctgccgtacgttctcggctctgcccaccagggctgcctgcctccgttcccggcggacgtgttcatgattccccagtacggctacctaacactcaacaacggtagtcaggccgtgggacgctcctccttctactgcctggaatactttccttcgcagatgctgagaaccggcaacaacttccagtttacttacaccttcgaggacgtgcctttccacagcagctacgcccacagccagagcttggaccggctgatgaatcctctgattgaccagtacctgtactacttgtctcggactcaaacaacaggaggcacggcaaatacgcagactctgggcttcagccaaggtgggcctaatacaatggccaatcaggcaaagaactggctgccaggaccctgttaccgccaacaacgcgtctcaacgacaaccgggcaaaacaacaatagcaactttgcctggactgctgggaccaaataccatctgaatggaagaaattcattggctaatcctggcatcgctatggcaacacacaaagacgacgaggagcgtttttttcccagtaacgggatcctgatttttggcaaacaaaatgctgccagagacaatgcggattacagcgatgtcatgctcaccagcgaggaagaaatcaaaaccactaaccctgtggctacagaggaatacggtatcgtggcagataacttgcagcagcaaaacacggctcctcaaattggaactgtcaacagccagggggccttacccggtatggtctggcagaaccgggacgtgtacctgcagggtcccatctgggccaagattcctcacacggacggcaacttccacccgtctccgctgatgggcggctttggcctgaaacatcctccgcctcagatcctgatcaagaacacgcctgtacctgcggatcctccgaccaccttcaaccagtcaaagctgaactctttcatcacgcaatacagcaccggacaggtcagcgtggaaattgaatgggagctgcagaaggaaaacagcaagcgctggaaccccgagatccagtacacctccaactactacaaatctacaagtgtggactttgctgttaatacagaaggcgtgtactctgaaccccgccccattggcacccgttacctcacccgtaatctgtaattgcctgttaatcaataaaccggttgattcgtttcagttgaactttggtctctgcgaagggcgaattcgtttaaacctgcaggactagagccgaattctgcatcgcgatagggataacagggtaataaataatgtactagagacactttcaataaaggcaaatgcttttatttgtacactctcgggtgattatttacccccacccttgccgtctgcgccgtttaaaaatcaaaggggttctgccgcgcatcgctatgcgccactggcagggacacgttgcgatactggtgtttagtgctccacttaaactcaggcacaaccatccgcggcagctcggtgaagttttcactccacaggctgcgcaccatcaccaacgcgtttagcaggtcgggcgccgatatcttgaagtcgcagttggggcctccgccctgcgcgcgcgagttgcgatacacagggttgcagcactggaacactatcagcgccgggtggtgcacgctggccagcacgctcttgtcggagatcagatccgcgtccaggtcctccgcgttgctcagggcgaacggagtcaactttggtagctgccttcccaaaaagggcgcgtgcccaggctttgagttgcactcgcaccgtagtggcatcaaaaggtgaccgtgcccggtctgggcgttaggatacagcgcctgcataaaagccttgatctgcttaaaagccacctgagcctttgcgccttcagagaagaacatgccgcaagacttgccggaaaactgattggccggacaggccgcgtcgtgcacgcagcaccttgcgtcggtgttggagatctgcaccacatttcggccccaccggttcttcacgatcttggccttgctagactgctccttcagcgcgcgctgcccgttttcgctcgtcacatccatttcaatcacgtgctccttatttatcataatgcttccgtgtagacacttaagctcgccttcgatctcagcgcagcggtgcagccacaacgcgcagcccgtgggctcgtgatgcttgtaggtcacctctgcaaacgactgcaggtacgcctgcaggaatcgccccatcatcgtcacaaaggtcttgttgctggtgaaggtcagctgcaacccgcggtgctcctcgttcagccaggtcttgcatacggccgccagagcttccacttggtcaggcagtagtttgaagttcgcctttagatcgttatccacgtggtacttgtccatcagcgcgcgcgcagcctccatgcccttctcccacgcagacacgatcggcacactcagcgggttcatcaccgtaatttcactttccgcttcgctgggctcttcctcttcctcttgcgtccgcataccacgcgccactgggtcgtcttcattcagccgccgcactgtgcgcttacctcctttgccatgcttgattagcaccggtgggttgctgaaacccaccatttgtagcgccacatcttctctttcttcctcgctgtccacgattacctctggtgatggcgggcgctcgggcttgggagaagggcgcttctttttcttcttgggcgcaatggccaaatccgccgccgaggtcgatggccgcgggctgggtgtgcgcggcaccagcgcgtcttgtgatgagtcttcctcgtcctcggactcgatacgccgcctcatccgcttttttgggggcgcccggggaggcggcggcgacggggacggggacgacacgtcctccatggttgggggacgtcgcgccgcaccgcgtccgcgctcgggggtggtttcgcgctgctcctcttcccgactggccatttccttctcctataggcagaaaaagatcgttgaaactcactccggggctgtggacgtcggcttaccttcgcaaatttgtacctgaggactaccacgcccacgagattaggttctacgaagaccaatcccgcccgcctaatgcggagcttaccgcctgcgtcattacccagggccacattcttggccaattgcaagccatcaacaaagcccgccaagagtttctgctacgaaagggacggggggtttacttggacccccagtccggcgaggagctcaacccaatccccccgccgccgcagccctatcagcagcagccgcgggcccttgcttcccaggatggcacccaaaaagaagctgcagctgccgccgccacccacggacgaggaggaatactgggacagtcaggcagaggaggttttggacgaggaggaggaggacatgatggaagactgggagagcctagacgaggaagcttccgaggtcgaagaggtgtcagacgaaacaccgtcaccctcggtcgcattcccctcgccggcgccccagaaatcggcaaccggttccagcatggctacaacctccgctcctcaggcgccgccggcactgcccgttcgccgacccaaccgtagatgggacaccactggaaccagggccggtaagtccaagcagccgccgccgttagcccaagagcaacaacagcgccaaggctaccgctcatggcgcgggcacaagaacgccatagttgcttgcttgcaagactgtgggggcaacatctccttcgcccgccgctttcttctctaccatcacggcgtggccttcccccgtaacatcctgcattactaccgtcatctctacagcccatactgcaccggcggcagcggcagcaacagcagcggccacacagaagcaaaggcgaccggatagcaagactctgacaaagcccaagaaatccacagcggcggcagcagcaggaggaggagcgctgcgtctggcgcccaacgaacccgtatcgacccgcgagcttagaaacaggatttttcccactctgtatgctatatttcaacagagcaggggccaagaacaagagctgaaaataaaaaacaggtctctgcgatccctcacccgcagctgcctgtatcacaaaagcgaagatcagcttcggcgcacgctggaagacgcggaggctctcttcagtaaatactgcgcgctgactcttaaggactagtttcgcgccctttctcaaatttaagcgcgaaaactacgtcatctccagcggccacacccggcgccagcacctgttgtcagcgccattttttagggcggagtaacttgtatgtgttgggaattgtagttttcttaaaatgggaagtgacgtaacgtgggaaaacggaagtgacgatttgaggaagttgtgggttttttggctttcgtttctgggcgtaggttcgcgtgcggttttctgggtgttttttgtggactttaaccgttacgtcattttttagtcctatatatactcgctctgcacttggcccttttttacactgtgactgattgagctggtgccgtgtcgagtggtgtttttttaataggttttcttttttactggtaaggctgactgttatgactacgtccggcgttccatttggcatgacactacgaccaacacgatctcggttgtctcggcgcactccgtacagtagggatcgtctacctccttttgagacagaaacccgcgctaccatactggaggatcatccgctgctgcccgaatgtaacactttgacaatgcacaacgtgagttacgtgcgaggtcttccctgcagtgtgggatttacgctgattcaggaatgggttgttccctgggatatggttctaacgcgggaggagcttgtaatcctgaggaagtgtatgcacgtgtgcctgtgttgtgccaacattgatatcatgacgagcatgatgatccatggttacgagtcctgggctctccactgtcattgttccagtcccggttccctgcagtgtatagccggcgggcaggttttggccagctggtttaggatggtggtggatggcgccatgtttaatcagaggtttatatggtaccgggaggtggtgaattacaacatgccaaaagaggtaatgtttatgtccagcgtgtttatgaggggtcgccacttaatctacctgcgcttgtggtatgatggccacgtgggttctgtggtccccgccatgagctttggatacagcgccttgcactgtgggattttgaacaatattgtggtgctgtgctgcagttactgtgctgatttaagtgagatcagggtgcgctgctgtgcccggaggacaaggcgccttatgctgcgggcggtgcgaatcatcgctgaggagaccactgccatgttgtattcctgcaggacggagcggcggcggcagcagtttattcgcgcgctgctgcagcaccaccgccctatcctgatgcacgattatgactctacccccatgtaggtttgattaaggtacggtgatctgtataagctatgtggtggtggggctatactactgaatgaaaaatgacttgaaattttctgcaattgaaaaataaacacgttgaaacataacacaaacgattctttattcttgggcaatgtatgaaaaagtgtaagaggatgtggcaaatatttcattaatgtagttgtggccagaccagtcccatgaaaatgacatagagtatgcacttggagttgtgtctcctgtttcctgtgtaccgtttagtgtaatggttagtgttacaggtttagttttgtctccgtttaagtaaacttgactgacaatgttacttttggcagttttaccgtgagattttggataagctgataggttaggcataaatccaacagcgtttgtataggctgtcgcccctcctgacgcggtaggaggaggggagggtgccctgcatgtctgccgctgctcttgctcttgccgctgctgaggaggggggcgcatctgccgcagcaccggatgcatctgggaaaagcaaaaaaggggctcgtccctgtttccggaggaatttgcaagcggggtcttgcatgacggggaggcaaacccccgttcgccgcagtccggccggtccgagactcgaaccgggggtcccgcgactcaacccttggaaaataaccctccggctacagggagcgagccacttaatgctttcgctttccagcctaaccgcttacgctgcgcgcggccagtggccaaaaaagctagcgcagcagccgccgcgcctggaaggaagccaaaaggagcactcccccgttgtctgacgtcgcacacctgggttcgacacgcgggcggtaaccgcatggatcacggcggacggccggatacggggctcgaaccccggtcgtccgccatgatacccttgcgaatttatccaccagaccacggaagagtgcccgcttacaggctctccttttgcacggtctagagcgtcaacgattgcgcgcgcctgaccggccagagcgtcccgaccatggagcactttttgccgctgcgcaacatctggaaccgcgtccgcgactttccgcgcgcctccaccaccgccgccggcatcacctggatgtccaggtacatctacggata

SEQ ID NO: 160 - DNA, 9546 bp, synthetic construct; identical to SEQ ID NO: 159
  source 1..9546: mol_type = other DNA

SEQ ID NO: 161 - DNA, 9546 bp, synthetic construct
  source 1..9546: mol_type = other DNA
atgccggggttttacgagattgtgattaaggtccccagcgaccttgacgagcatctgcccggcatttctgacagctttgtgaactgggtggccgagaaggaatgggagttgccgccagattctgacatggatctgaatctgattgagcaggcacccctgaccgtggccgagaagctgcagcgcgactttctgacggaatggcgccgtgtgagtaaggccccggaggctcttttctttgtgcaatttgagaagggagagagctacttccacatgcacgtgctcgtggaaaccaccggggtgaaatccatggttttgggacgtttcctgagtcagattcgcgaaaaactgattcagagaatttaccgcgggatcgagccgactttgccaaactggttcgcggtcacaaagaccagaaatggcgccggaggcgggaacaaggtggtggatgagtgctacatccccaattacttgctccccaaaacccagcctgagctccagtgggcgtggactaatatggaacagtatttaagcgcctgtttgaatctcacggagcgtaaacggttggtggcgcagcatctgacgcacgtgtcgcagacgcaggagcagaacaaagagaatcagaatcccaattctgatgcgccggtgatcagatcaaaaacttcagccaggtacatggagctggtcgggtggctcgtggacaaggggattacctcggagaagcagtggatccaggaggaccaggcctcatacatctccttcaatgcggcctccaactcgcggtcccaaatcaaggctgccttggacaatgcgggaaagattatgagcctgactaaaaccgcccccgactacctggtgggccagcagcccgtggaggacatttccagcaatcggatttataaaattttggaactaaacgggtacgatccccaatatgcggcttccgtctttctgggatgggccacgaaaaagttcggcaagaggaacaccatctggctgtttgggcctgcaactaccgggaagaccaacatcgcggaggccatagcccacactgtgcccttctacgggtgcgtaaactggaccaatgagaactttcccttcaacgactgtgtcgacaagatggtgatctggtgggaggaggggaagatgaccgccaaggtcgtggagtcggccaaagccattctcggaggaagcaaggtgcgcgtggaccagaaatgcaagtcctcggcccagatagacccgactcccgtgatcgtcacctccaacaccaacatgtgcgccgtgattgacgggaactcaacgaccttcgaacaccagcagccgttgcaagaccggatgttcaaatttgaactcacccgccgtctggatcatgactttgggaaggtcaccaagcaggaagtcaaagactttttccggtgggcaaaggatcacgtggttgaggtggagcatgaattctacgtcaaaaagggtggagccaagaaaagacccgcccccagtgacgcagatataagtgagcccaaacgggtgcgcgagtcagttgcgcagccatcgacgtcagacgcggaagcttcgatcaactacgcagacaggtaccaaaacaaatgttctcgtcacgtgggcatgaatctgatgctgtttccctgcagacaatgcgagagaatgaatcagaattcaaatatctgcttcactcacggacagaaagactgtttagagtgctttcccgtgtcagaatctcaacccgtttctgtcgtcaaaaaggcgtatcagaaactgtgctacattcatcatatcatgggaaaggtgccagacgcttgcactgcctgcgatctggtcaatgtggatttggatgactgcatctttgaacaataaatgatttaaatcaggtatggctgccgatggttatcttccagattggctcgaggacaacctctctgagggcattcgcgagtggtgggcgctgaaacctggagccccgaagcccaaagccaaccagcaaaagcaggacgacggccggggtctggtgcttcctggctacaagtacctcggacccttcaacggactcgacaagggggagcccgtcaacgcggcggacgcagcggccctcgagcacgacaaggcctacgaccagcagctgcaggcgggtgacaatccgtacctgcggtataaccacgccgacgccgagtttcaggagcgtctgcaagaagatacgtcttttgggggcaacctcgggcgagcagtcttccaggccaagaagcgggttctcgaacctctcggtctggttgaggaaggcgctaagacggctcctggaaagaagagaccggtagagccatcaccccagcgttctccagactcctctacgggcatcggcaagaaaggccaacagcccgccagaaaaagactcaattttggtcagactggcgactcagagtcagttccagaccctcaacctctcggagaacctccagcagcgccctctggtgtgggacctaatacaatggctgcaggcggtggcgcaccaatggcagacaataacgaaggcgccgacggagtgggtagttcctcgggaaattggcattgcgattccacatggctgggcgacagagtcatcaccaccagcacccgaacctgggccctgcccacctacaacaaccacctctacaagcaaatctccaacgggacatcgggaggagccaccaacgacaacacctacttcggctacagcaccccctgggggtattttgactttaacagattccactgccacttttcaccacgtgactggcagcgactcatcaacaacaactggggattccggcccaagagactcagcttcaagctcttcaacatccaggtcaaggaggtcacgcagaatgaaggcaccaagaccatcgccaataacctcaccagcaccatccaggtgtttacggactcggagtaccagctgccgtacgttctcggctctgcccaccagggctgcctgcctccgttcccggcggacgtgttcatgattccccagtacggctacctaacactcaacaacggtagtcaggccgtgggacgctcctccttctactgcctggaatactttccttcgcagatgctgagaaccggcaacaacttccagtttacttacaccttcgaggacgtgcctttccacagcagctacgcccacagccagagcttggaccggctgatgaatcctctgattgaccagtacctgtactacttgtctcggactcaaacaacaggaggcacggcaaatacgcagactctgggcttcagccaaggtgggcctaatacaatggccaatcaggcaaagaactggctgccaggaccctgttaccgccaacaacgcgtctcaacgacaaccgggcaaaacaacaatagcaactttgcctggactgctgggaccaaataccatctgaatggaagaaattcattggctaatcctggcatcgctatggcaacacacaaagacgacgaggagcgtttttttcccagtaacgggatcctgatttttggcaaacaaaatgctgccagagacaatgcggattacagcgatgtcatgctcaccagcgaggaagaaatcaaaaccactaaccctgtggctacagaggaatacggtatcgtggcagataacttgcagcagcaaaacacggctcctcaaattggaactgtcaacagccagggggccttacccggtatggtctggcagaaccgggacgtgtacctgcagggtcccatctgggccaagattcctcacacggacggcaacttccacccgtctccgctgatgggcggctttggcctgaaacatcctccgcctcagatcctgatcaagaacacgcctgtacctgcggatcctccgaccaccttcaaccagtcaaagctgaactctttcatcacgcaatacagcaccggacaggtcagcgtggaaattgaatgggagctgcagaaggaaaacagcaagcgctggaaccccgagatccagtacacctccaactactacaaatctacaagtgtggactttgctgttaatacagaaggcgtgtactctgaaccccgccccattggcacccgttacctcacccgtaatctgtaattgcctgttaatcaataaaccggttgattcgtttcagttgaactttggtctctgcgaagggcgaattcgtttaaacctgcaggactagagccgaattctgcatcgcgatagggataacagggtaataaataatgtactagagacactttcaataaaggcaaatgcttttatttgtacactctcgggtgattatttacccccacccttgccgtctgcgccgttcagaagtcgaaggggttctgtctggcatcggaatgggccacgggcagagacacgttccggtactggtgcttggtggaccacttgaactcaggcacgaccattctaggcagctctgtgaagttctcgctccacaggctccgcaccatcaccagggcgttcagcaggtcaggggcgctgattttgaagtcgcagttaggtccgccgccctgggctctgctgtttctgtacacagggttgcagcactggaacacaataagagcagggtggtgcacgctggccagcacagacttgtcgctgatcaggtcggcgtcgagatcctcggcgttagacaaggcaaaaggggtcagcttgggcagctggcggcccaggaaaggggcgtggccgggcttgctattgcactcgcatctcagaggcatcagcaggtggccgtggccggtctgggcgttggggtacagggcctgcataaaggccttgatctgtttgaaggccacttgggccttggcgccttcggagaagaacatgccgcagcttttgccgctgaactggttggcggggcaggcggcgtcgtgcacacaacaccgggcgtcggtattgctgatctgcaccacgtttctgccccatctgttcttcacgatcttggccttgctgctctgctctttcagggccctctggccgttctcagaggtgacgtccatctcgatcacatgttccttgttgatcatgatgctgccgtgcagacacttcagctcgccctcgatttccgcgcatctgtgcagccacagggcacaaccggtaggctcgtggtgcttgtatgtcacctcagcaaaagattgcaggtaggcttgcaggaatctgcccatcatggtcacgaaggtcttgttggaggtaaaagtcagctgcagtcctctgtgttcctcgttcagccatgtcttgcacacggcggccagagcctcgacctgatctggcagcagcttgaaattagccttcaggtcgttgtccacgtgatacttatccatcagtgctctggcggcttccatgcccttctcccaggcggaaacgatgggcacgctcagggggttcatcacggtgatctcgctttcagcttctgaaggttcctcctcttcctcctgtgttctcatgccccgagccacggggtcgtcctcattcagtctccgcacggttctttttcctccctttccgtgcttaatcagtacaggaggattagagaagcccaccatctggagggcgacgtcctccctttcttcttcgctatccacgatcacttctgggctggggggccgttcaggctttgggctaggccgtttttttttcttcttaggggcgatagccagatcagcggcgcttgtagagggccgaggactaggggttctaggcacgagggcgtcctggctgctgtcctcctcatcctcgctctcgatccgtctccgcattctcttcttagggggggcccgcggagggggagggctagggctaggggacgacacatcttccatggttggaggtctgcgagcagcgcctctgcctctctctggtgttgtctcgcgctgttcttcctctctagaggccatttccttctcctataggcagaaaaagatcgttgaaactcactccggggctgtggacgtcggcttaccttcgcaaatttgtacctgaggactaccacgcccacgagattaggttctacgaagaccaatcccgcccgcctaatgcggagcttaccgcctgcgtcattacccagggccacattcttggccaattgcaagccatcaacaaagcccgccaagagtttctgctacgaaagggacggggggtttacttggacccccagtccggcgaggagctcaacccaatccccccgccgccgcagccctatcagcagcagccgcgggcccttgcttcccaggatggcacccaaaaagaagctgcagctgccgccgccacccacggacgaggaggaatactgggacagtcaggcagaggaggttttggacgaggaggaggaggacatgatggaagactgggagagcctagacgaggaagcttccgaggtcgaagaggtgtcagacgaaacaccgtcaccctcggtcgcattcccctcgccggcgccccagaaatcggcaaccggttccagcatggctacaacctccgctcctcaggcgccgccggcactgcccgttcgccgacccaaccgtagatgggacaccactggaaccagggccggtaagtccaagcagccgccgccgttagcccaagagcaacaacagcgccaaggctaccgctcatggcgcgggcacaagaacgccatagttgcttgcttgcaagactgtgggggcaacatctccttcgcccgccgctttcttctctaccatcacggcgtggccttcccccgtaacatcctgcattactaccgtcatctctacagcccatactgcaccggcggcagcggcagcaacagcagcggccacacagaagcaaaggcgaccggatagcaagactctgacaaagcccaagaaatccacagcggcggcagcagcaggaggaggagcgctgcgtctggcgcccaacgaacccgtatcgacccgcgagcttagaaacaggatttttcccactctgtatgctatatttcaacagagcaggggccaagaacaagagctgaaaataaaaaacaggtctctgcgatccctcacccgcagctgcctgtatcacaaaagcgaagatcagcttcggcgcacgctggaagacgcggaggctctcttcagtaaatactgcgcgctgactcttaaggactagtttcgcgccctttctcaaatttaagcgcgaaaactacgtcatctccagcggccacacccggcgccagcacctgttgtcagcgccattttttagggcggagtaacttgtatgtgttgggaattgtagttttcttaaaatgggaagtgacgtaacgtgggaaaacggaagtgacgatttgaggaagttgtgggttttttggctttcgtttctgggcgtaggttcgcgtgcggttttctgggtgttttttgtggactttaaccgttacgtcattttttagtcctatatatactcgctctgcacttggcccttttttacactgtgactgattgagctggtgccgtgtcgagtggtgtttttttaataggttttcttttttactggtaaggctgactgttatgactacgtccggcgttccatttggcatgacactacgaccaacacgatctcggttgtctcggcgcactccgtacagtagggatcgtctacctccttttgagacagaaacccgcgctaccatactggaggatcatccgctgctgcccgaatgtaacactttgacaatgcacaacgtgagttacgtgcgaggtcttccctgcagtgtgggatttacgctgattcaggaatgggttgttccctgggatatggttctaacgcgggaggagcttgtaatcctgaggaagtgtatgcacgtgtgcctgtgttgtgccaacattgatatcatgacgagcatgatgatccatggttacgagtcctgggctctccactgtcattgttccagtcccggttccctgcagtgtatagccggcgggcaggttttggccagctggtttaggatggtggtggatggcgccatgtttaatcagaggtttatatggtaccgggaggtggtgaattacaacatgccaaaagaggtaatgtttatgtccagcgtgtttatgaggggtcgccacttaatctacctgcgcttgtggtatgatggccacgtgggttctgtggtccccgccatgagctttggatacagcgccttgcactgtgggattttgaacaatattgtggtgctgtgctgcagttactgtgctgatttaagtgagatcagggtgcgctgctgtgcccggaggacaaggcgccttatgctgcgggcggtgcgaatcatcgctgaggagaccactgccatgttgtattcctgcaggacggagcggcggcggcagcagtttattcgcgcgctgctgcagcaccaccgccctatcctgatgcacgattatgactctacccccatgtaggtttgattaaggtacggtgatctgtataagctatgtggtggtggggctatactactgaatgaaaaatgacttgaaattttctgcaattgaaaaataaacacgttgaaacataacacaaacgattctttattcttgggcaatgtatgaaaaagtgtaagaggatgtggcaaatatttcattaatgtagttgtggccagaccagtcccatgaaaatgacatagagtatgcacttggagttgtgtctcctgtttcctgtgtaccgtttagtgtaatggttagtgttacaggtttagttttgtctccgtttaagtaaacttgactgacaatgttacttttggcagttttaccgtgagattttggataagctgataggttaggcataaatccaacagcgtttgtataggctgtcgcccctcctgacgcggtaggaggaggggagggtgccctgcatgtctgccgctgctcttgctcttgccgctgctgaggaggggggcgcatctgccgcagcaccggatgcatctgggaaaagcaaaaaaggggctcgtccctgtttccggaggaatttgcaagcggggtcttgcatgacggggaggcaaacccccgttcgccgcagtccggccggtccgagactcgaaccgggggtcccgcgactcaacccttggaaaataaccctccggctacagggagcgagccacttaatgctttcgctttccagcctaaccgcttacgctgcgcgcggccagtggccaaaaaagctagcgcagcagccgccgcgcctggaaggaagccaaaaggagcactcccccgttgtctgacgtcgcacacctgggttcgacacgcgggcggtaaccgcatggatcacggcggacggccggatacggggctcgaaccccggtcgtccgccatgatacccttgcgaatttatccaccagaccacggaagagtgcccgcttacaggctctccttttgcacggtctagagcgtcaacgattgcgcgcgcctgaccggccagagcgtcccgaccatggagcactttttgccgctgcgcaacatctggaaccgcgtccgcgactttccgcgcgcctccaccaccgccgccggcatcacctggatgtccaggtacatctacggata

SEQ ID NO: 162 - DNA, 12309 bp, synthetic construct
  source 1..12309: mol_type = other DNA
tcgcgcgtttcggtgatgacggtgaaaacctctgacacatgcagctcccggagacggtcacagcttgtctgtaagcggatgccgggagcagacaagcccgtcagggcgcgtcagcgggtgttggcgggtgtcggggctggcttaactatgcggcatcagagcagattgtactgagagtgcaccatatgcggtgtgaaataccgcacagatgcgtaaggagaaaataccgcatcaggcgccattcgccattcaggctgcgcaactgttgggaagggcgatcggtgcgggcctcttcgctattacgccagctggcgaaagggggatgtgctgcaaggcgattaagttgggtaacgccagggttttcccagtcacgacgttgtaaaacgacggccagagaattccgcagggtctccattttgaagcgggaggtttgaacgcgcagccgccatgccggggttttacgagattgtgattaaggtccccagcgaccttgacgagcatctgcccggcatttctgacagctttgtgaactgggtggccgagaaggaatgggagttgccgccagattctgacatggatctgaatctgattgagcaggcacccctgaccgtggccgagaagctgcagcgcgactttctgacggaatggcgccgtgtgagtaaggccccggaggctcttttctttgtgcaatttgagaagggagagagctacttccacatgcacgtgctcgtggaaaccaccggggtgaaatccatggttttgggacgtttcctgagtcagattcgcgaaaaactgattcagagaatttaccgcgggatcgagccgactttgccaaactggttcgcggtcacaaagaccagaaatggcgccggaggcgggaacaaggtggtggatgagtgctacatccccaattacttgctccccaaaacccagcctgagctccagtgggcgtggactaatatggaacagtatttaagcgcctgtttgaatctcacggagcgtaaacggttggtggcgcagcatctgacgcacgtgtcgcagacgcaggagcagaacaaagagaatcagaatcccaattctgatgcgccggtgatcagatcaaaaacttcagccaggtacatggagctggtcgggtggctcgtggacaaggggattacctcggagaagcagtggatccaggaggaccaggcctcatacatctccttcaatgcggcctccaactcgcggtcccaaatcaaggctgccttggacaatgcgggaaagattatgagcctgactaaaaccgcccccgactacctggtgggccagcagcccgtggaggacatttccagcaatcggatttataaaattttggaactaaacgggtacgatccccaatatgcggcttccgtctttctgggatgggccacgaaaaagttcggcaagaggaacaccatctggctgtttgggcctgcaactaccgggaagaccaacatcgcggaggccatagcccacactgtgcccttctacgggtgcgtaaactggaccaatgagaactttcccttcaacgactgtgtcgacaagatggtgatctggtgggaggaggggaagatgaccgccaaggtcgtggagtcggccaaagccattctcggaggaagcaaggtgcgcgtggaccagaaatgcaagtcctcggcccagatagacccgactcccgtgatcgtcacctccaacaccaacatgtgcgccgtgattgacgggaactcaacgaccttcgaacaccagcagccgttgcaagaccggatgttcaaatttgaactcacccgccgtctggatcatgactttgggaaggtcaccaagcaggaagtcaaagactttttccggtgggcaaaggatcacgtggttgaggtggagcatgaattctacgtcaaaaagggtggagccaagaaaagacccgcccccagtgacgcagatataagtgagcccaaacgggtgcgcgagtcagttgcgcagccatcgacgtcagacgcggaagcttcgatcaactacgcagacaggtaccaaaacaaatgttctcgtcacgtgggcatgaatctgatgctgtttccctgcagacaatgcgagagaatgaatcagaattcaaatatctgcttcactcacggacagaaagactgtttagagtgctttcccgtgtcagaatctcaacccgtttctgtcgtcaaaaaggcgtatcagaaactgtgctacattcatcatatcatgggaaaggtgccagacgcttgcactgcctgcgatctggtcaatgtggatttggatgactgcatctttgaacaataaatgatttaaatcaggtatggctgccgatggttatcttccagattggctcgaggacaacctctctgagggcattcgcgagtggtgggcgctgaaacctggagccccgaagcccaaagccaaccagcaaaagcaggacgacggccggggtctggtgcttcctggctacaagtacctcggacccttcaacggactcgacaagggggagcccgtcaacgcggcggacgcagcggccctcgagcacgacaaggcctacgaccagcagctgcaggcgggtgacaatccgtacctgcggtataaccacgccgacgccgagtttcaggagcgtctgcaagaagatacgtcttttgggggcaacctcgggcgagcagtcttccaggccaagaagcgggttctcgaacctctcggtctggttgaggaaggcgctaagacggctcctggaaagaagagaccggtagagccatcaccccagcgttctccagactcctctacgggcatcggcaagaaaggccaacagcccgccagaaaaagactcaattttggtcagactggcgactcagagtcagttccagaccctcaacctctcggagaacctccagcagcgccctctggtgtgggacctaatacaatggctgcaggcggtggcgcaccaatggcagacaataacgaaggcgccgacggagtgggtagttcctcgggaaattggcattgcgattccacatggctgggcgacagagtcatcaccaccagcacccgaacctgggccctgcccacctacaacaaccacctctacaagcaaatctccaacgggacatcgggaggagccaccaacgacaacacctacttcggctacagcaccccctgggggtattttgactttaacagattccactgccacttttcaccacgtgactggcagcgactcatcaacaacaactggggattccggcccaagagactcagcttcaagctcttcaacatccaggtcaaggaggtcacgcagaatgaaggcaccaagaccatcgccaataacctcaccagcaccatccaggtgtttacggactcggagtaccagctgccgtacgttctcggctctgcccaccagggctgcctgcctccgttcccggcggacgtgttcatgattccccagtacggctacctaacactcaacaacggtagtcaggccgtgggacgctcctccttctactgcctggaatactttccttcgcagatgctgagaaccggcaacaacttccagtttacttacaccttcgaggacgtgcctttccacagcagctacgcccacagccagagcttggaccggctgatgaatcctctgattgaccagtacctgtactacttgtctcggactcaaacaacaggaggcacggcaaatacgcagactctgggcttcagccaaggtgggcctaatacaatggccaatcaggcaaagaactggctgccaggaccctgttaccgccaacaacgcgtctcaacgacaaccgggcaaaacaacaatagcaactttgcctggactgctgggaccaaataccatctgaatggaagaaattcattggctaatcctggcatcgctatggcaacacacaaagacgacgaggagcgtttttttcccagtaacgggatcctgatttttggcaaacaaaatgctgccagagacaatgcggattacagcgatgtcatgctcaccagcgaggaagaaatcaaaaccactaaccctgtggctacagaggaatacggtatcgtggcagataacttgcagcagcaaaacacggctcctcaaattggaactgtcaacagccagggggccttacccggtatggtctggcagaaccgggacgtgtacctgcagggtcccatctgggccaagattcctcacacggacggcaacttccacccgtctccgctgatgggcggctttggcctgaaacatcctccgcctcagatcctgatcaagaacacgcctgtacctgcggatcctccgaccaccttcaaccagtcaaagctgaactctttcatcacgcaatacagcaccggacaggtcagcgtggaaattgaatgggagctgcagaaggaaaacagcaagcgctggaaccccgagatccagtacacctccaactactacaaatctacaagtgtggactttgctgttaatacagaaggcgtgtactctgaaccccgccccattggcacccgttacctcacccgtaatctgtaattgcctgttaatcaataaaccggttgattcgtttcagttgaactttggtctctgcgaagggcgaattcgtttaaacctgcaggactagagccgaattctgcatcgcgatagggataacagggtaataaataatgtactagagacactttcaataaaggcaaatgcttttatttgtacactctcgggtgattatttacccccacccttgccgtctgcgccgtttaaaaatcaaaggggttctgccgcgcatcgctatgcgccactggcagggacacgttgcgatactggtgtttagtgctccacttaaactcaggcacaaccatccgcggcagctcggtgaagttttcactccacaggctgcgcaccatcaccaacgcgtttagcaggtcgggcgccgatatcttgaagtcgcagttggggcctccgccctgcgcgcgcgagttgcgatacacagggttgcagcactggaacactatcagcgccgggtggtgcacgctggccagcacgctcttgtcggagatcagatccgcgtccaggtcctccgcgttgctcagggcgaacggagtcaactttggtagctgccttcccaaaaagggcgcgtgcccaggctttgagttgcactcgcaccgtagtggcatcaaaaggtgaccgtgcccggtctgggcgttaggatacagcgcctgcataaaagccttgatctgcttaaaagccacctgagcctttgcgccttcagagaagaacatgccgcaagacttgccggaaaactgattggccggacaggccgcgtcgtgcacgcagcaccttgcgtcggtgttggagatctgcaccacatttcggccccaccggttcttcacgatcttggccttgctagactgctccttcagcgcgcgctgcccgttttcgctcgtcacatccatttcaatcacgtgctccttatttatcataatgcttccgtgtagacacttaagctcgccttcgatctcagcgcagcggtgcagccacaacgcgcagcccgtgggctcgtgatgcttgtaggtcacctctgcaaacgactgcaggtacgcctgcaggaatcgccccatcatcgtcacaaaggtcttgttgctggtgaaggtcagctgcaacccgcggtgctcctcgttcagccaggtcttgcatacggccgccagagcttccacttggtcaggcagtagtttgaagttcgcctttagatcgttatccacgtggtacttgtccatcagcgcgcgcgcagcctccatgcccttctcccacgcagacacgatcggcacactcagcgggttcatcaccgtaatttcactttccgcttcgctgggctcttcctcttcctcttgcgtccgcataccacgcgccactgggtcgtcttcattcagccgccgcactgtgcgcttacctcctttgccatgcttgattagcaccggtgggttgctgaaacccaccatttgtagcgccacatcttctctttcttcctcgctgtccacgattacctctggtgatggcgggcgctcgggcttgggagaagggcgcttctttttcttcttgggcgcaatggccaaatccgccgccgaggtcgatggccgcgggctgggtgtgcgcggcaccagcgcgtcttgtgatgagtcttcctcgtcctcggactcgatacgccgcctcatccgcttttttgggggcgcccggggaggcggcggcgacggggacggggacgacacgtcctccatggttgggggacgtcgcgccgcaccgcgtccgcgctcgggggtggtttcgcgctgctcctcttcccgactggccatttccttctcctataggcagaaaaagatcgttgaaactcactccggggctgtggacgtcggcttaccttcgcaaatttgtacctgaggactaccacgcccacgagattaggttctacgaagaccaatcccgcccgcctaatgcggagcttaccgcctgcgtcattacccagggccacattcttggccaattgcaagccatcaacaaagcccgccaagagtttctgctacgaaagggacggggggtttacttggacccccagtccggcgaggagctcaacccaatccccccgccgccgcagccctatcagcagcagccgcgggcccttgcttcccaggatggcacccaaaaagaagctgcagctgccgccgccacccacggacgaggaggaatactgggacagtcaggcagaggaggttttggacgaggaggaggaggacatgatggaagactgggagagcctagacgaggaagcttccgaggtcgaagaggtgtcagacgaaacaccgtcaccctcggtcgcattcccctcgccggcgccccagaaatcggcaaccggttccagcatggctacaacctccgctcctcaggcgccgccggcactgcccgttcgccgacccaaccgtagatgggacaccactggaaccagggccggtaagtccaagcagccgccgccgttagcccaagagcaacaacagcgccaaggctaccgctcatggcgcgggcacaagaacgccatagttgcttgcttgcaagactgtgggggcaacatctccttcgcccgccgctttcttctctaccatcacggcgtggccttcccccgtaacatcctgcattactaccgtcatctctacagcccatactgcaccggcggcagcggcagcaacagcagcggccacacagaagcaaaggcgaccggatagcaagactctgacaaagcccaagaaatccacagcggcggcagcagcaggaggaggagcgctgcgtctggcgcccaacgaacccgtatcgacccgcgagcttagaaacaggatttttcccactctgtatgctatatttcaacagagcaggggccaagaacaagagctgaaaataaaaaacaggtctctgcgatccctcacccgcagctgcctgtatcacaaaagcgaagatcagcttcggcgcacgctggaagacgcggaggctctcttcagtaaatactgcgcgctgactcttaaggactagtttcgcgccctttctcaaatttaagcgcgaaaactacgtcatctccagcggccacacccggcgccagcacctgttgtcagcgccattttttagggcggagtaacttgtatgtgttgggaattgtagttttcttaaaatgggaagtgacgtaacgtgggaaaacggaagtgacgatttgaggaagttgtgggttttttggctttcgtttctgggcgtaggttcgcgtgcggttttctgggtgttttttgtggactttaaccgttacgtcattttttagtcctatatatactcgctctgcacttggcccttttttacactgtgactgattgagctggtgccgtgtcgagtggtgtttttttaataggttttcttttttactggtaaggctgactgttatgactacgtccggcgttccatttggcatgacactacgaccaacacgatctcggttgtctcggcgcactccgtacagtagggatcgtctacctccttttgagacagaaacccgcgctaccatactggaggatcatccgctgctgcccgaatgtaacactttgacaatgcacaacgtgagttacgtgcgaggtcttccctgcagtgtgggatttacgctgattcaggaatgggttgttccctgggatatggttctaacgcgggaggagcttgtaatcctgaggaagtgtatgcacgtgtgcctgtgttgtgccaacattgatatcatgacgagcatgatgatccatggttacgagtcctgggctctccactgtcattgttccagtcccggttccctgcagtgtatagccggcgggcaggttttggccagctggtttaggatggtggtggatggcgccatgtttaatcagaggtttatatggtaccgggaggtggtgaattacaacatgccaaaagaggtaatgtttatgtccagcgtgtttatgaggggtcgccacttaatctacctgcgcttgtggtatgatggccacgtgggttctgtggtccccgccatgagctttggatacagcgccttgcactgtgggattttgaacaatattgtggtgctgtgctgcagttactgtgctgatttaagtgagatcagggtgcgctgctgtgcccggaggacaaggcgccttatgctgcgggcggtgcgaatcatcgctgaggagaccactgccatgttgtattcctgcaggacggagcggcggcggcagcagtttattcgcgcgctgctgcagcaccaccgccctatcctgatgcacgattatgactctacccccatgtaggtttgattaaggtacggtgatctgtataagctatgtggtggtggggctatactactgaatgaaaaatgacttgaaattttctgcaattgaaaaataaacacgttgaaacataacacaaacgattctttattcttgggcaatgtatgaaaaagtgtaagaggatgtggcaaatatttcattaatgtagttgtggccagaccagtcccatgaaaatgacatagagtatgcacttggagttgtgtctcctgtttcctgtgtaccgtttagtgtaatggttagtgttacaggtttagttttgtctccgtttaagtaaacttgactgacaatgttacttttggcagttttaccgtgagattttggataagctgataggttaggcataaatccaacagcgtttgtataggctgtcgcccctcctgacgcggtaggaggaggggagggtgccctgcatgtctgccgctgctcttgctcttgccgctgctgaggaggggggcgcatctgccgcagcaccggatgcatctgggaaaagcaaaaaaggggctcgtccctgtttccggaggaatttgcaagcggggtcttgcatgacggggaggcaaacccccgttcgccgcagtccggccggtccgagactcgaaccgggggtcccgcgactcaacccttggaaaataaccctccggctacagggagcgagccacttaatgctttcgctttccagcctaaccgcttacgctgcgcgcggccagtggccaaaaaagctagcgcagcagccgccgcgcctggaaggaagccaaaaggagcactcccccgttgtctgacgtcgcacacctgggttcgacacgcgggcggtaaccgcatggatcacggcggacggccggatacggggctcgaaccccggtcgtccgccatgatacccttgcgaatttatccaccagaccacggaagagtgcccgcttacaggctctccttttgcacggtctagagcgtcaacgattgcgcgcgcctgaccggccagagcgtcccgaccatggagcactttttgccgctgcgcaacatctggaaccgcgtccgcgactttccgcgcgcctccaccaccgccgccggcatcacctggatgtccaggtacatctacggatatggcaaacagctattatgggtattatgggtgcggccgcggatcccgggcccgtcgactgcagaggcctgcatgcaagcttggtgtaatcatggtcatagctgtttcctgtgtgaaattgttatccgctcacaattccacacaacatacgagccggaaggtcctgtattagaggtcacgtgagtgttttgcgacattttgcgacaccatgtggtcacgctgggtatttaagcccgagtgagcacgcagggtctccattttgaagcgggaggtttgaacgcgcagccgccaagcataaagtgtaaagcctggggtgcctaatgagtgagctaactcacattaattgcgttgcgctcactgcccgctttccagtcgggaaacctgtcgtgccagctgcattaatgaatcggccaacgcgcggggagaggcggtttgcgtattgggcgctcttccgcttcctcgctcactgactcgctgcgctcggtcgttcggctgcggcgagcggtatcagctcactcaaaggcggtaatacggttatccacagaatcaggggataacgcaggaaagaacatgtgagcaaaaggccagcaaaaggccaggaaccgtaaaaaggccgcgttgctggcgtttttccataggctccgcccccctgacgagcatcacaaaaatcgacgctcaagtcagaggtggcgaaacccgacaggactataaagataccaggcgtttccccctggaagctccctcgtgcgctctcctgttccgaccctgccgcttaccggatacctgtccgcctttctcccttcgggaagcgtggcgctttctcatagctcacgctgtaggtatctcagttcggtgtaggtcgttcgctccaagctgggctgtgtgcacgaaccccccgttcagcccgaccgctgcgccttatccggtaactatcgtcttgagtccaacccggtaagacacgacttatcgccactggcagcagccactggtaacaggattagcagagcgaggtatgtaggcggtgctacagagttcttgaagtggtggcctaactacggctacactagaagaacagtatttggtatctgcgctctgctgaagccagttaccttcggaaaaagagttggtagctcttgatccggcaaacaaaccaccgctggtagcggtggtttttttgtttgcaagcagcagattacgcgcagaaaaaaaggatctcaagaagatcctttgatcttttctacggggtctgacgctcagtggaacgaaaactcacgttaagggattttggtcatgagattatcaaaaaggatcttcacctagatccttttaaattaaaaatgaagttttaaatcaagcccaatctgaataatgttacaaccaattaaccaattctgattagaaaaactcatcgagcatcaaatgaaactgcaatttattcatatcaggattatcaataccatatttttgaaaaagccgtttctgtaatgaaggagaaaactcaccgaggcagttccataggatggcaagatcctggtatcggtctgcgattccgactcgtccaacatcaatacaacctattaatttcccctcgtcaaaaataaggttatcaagtgagaaatcaccatgagtgacgactgaatccggtgagaatggcaaaagtttatgcatttctttccagacttgttcaacaggccagccattacgctcgtcatcaaaatcactcgcatcaaccaaaccgttattcattcgtgattgcgcctgagcgagacgaaatacgcgatcgctgttaaaaggacaattacaaacaggaatcgaatgcaaccggcgcaggaacactgccagcgcatcaacaatattttcacctgaatcaggatattcttctaatacctggaatgctgtttttccggggatcgcagtggtgagtaaccatgcatcatcaggagtacggataaaatgcttgatggtcggaagaggcataaattccgtcagccagtttagtctgaccatctcatctgtaacatcattggcaacgctacctttgccatgtttcagaaacaactctggcgcatcgggcttcccatacaagcgatagattgtcgcacctgattgcccgacattatcgcgagcccatttatacccatataaatcagcatccatgttggaatttaatcgcggcctcgacgtttcccgttgaatatggctcataacaccccttgtattactgtttatgtaagcagacagttttattgttcatgatgatatatttttatcttgtgcaatgtaacatcagagattttgagacacgggccagagctgca

SEQ ID NO: 163 - DNA, 12309 bp, synthetic construct
  source 1..12309: mol_type = other DNA
tcgcgcgtttcggtgatgacggtgaaaacctctgacacatgcagctcccggagacggtcacagcttgtctgtaagcggatgccgggagcagacaagcccgtcagggcgcgtcagcgggtgttggcgggtgtcggggctggcttaactatgcggcatcagagcagattgtactgagagtgcaccatatgcggtgtgaaataccgcacagatgcgtaaggagaaaataccgcatcaggcgccattcgccattcaggctgcgcaactgttgggaagggcgatcggtgcgggcctcttcgctattacgccagctggcgaaagggggatgtgctgcaaggcgattaagttgggtaacgccagggttttcccagtcacgacgttgtaaaacgacggccagagaattccgcagggtctccattttgaagcgggaggtttgaacgcgcagccgccatgccggggttttacgagattgtgattaaggtccccagcgaccttgacgagcatctgcccggcatttctgacagctttgtgaactgggtggccgagaaggaatgggagttgccgccagattctgacatggatctgaatctgattgagcaggcacccctgaccgtggccgagaagctgcagcgcgactttctgacggaatggcgccgtgtgagtaaggccccggaggctcttttctttgtgcaatttgagaagggagagagctacttccacatgcacgtgctcgtggaaaccaccggggtgaaatccatggttttgggacgtttcctgagtcagattcgcgaaaaactgattcagagaatttaccgcgggatcgagccgactttgccaaactggttcgcggtcacaaagaccagaaatggcgccggaggcgggaacaaggtggtggatgagtgctacatccccaattacttgctccccaaaacccagcctgagctccagtgggcgtggactaatatggaacagtatttaagcgcctgtttgaatctcacggagcgtaaacggttggtggcgcagcatctgacgcacgtgtcgcagacgcaggagcagaacaaagagaatcagaatcccaattctgatgcgccggtgatcagatcaaaaacttcagccaggtacatggagctggtcgggtggctcgtggacaaggggattacctcggagaagcagtggatccaggaggaccaggcctcatacatctccttcaatgcggcctccaactcgcggtcccaaatcaaggctgccttggacaatgcgggaaagattatgagcctgactaaaaccgcccccgactacctggtgggccagcagcccgtggaggacatttccagcaatcggatttataaaattttggaactaaacgggtacgatccccaatatgcggcttccgtctttctgggatgggccacgaaaaagttcggcaagaggaacaccatctggctgtttgggcctgcaactaccgggaagaccaacatcgcggaggccatagcccacactgtgcccttctacgggtgcgtaaactggaccaatgagaactttcccttcaacgactgtgtcgacaagatggtgatctggtgggaggaggggaagatgaccgccaaggtcgtggagtcggccaaagccattctcggaggaagcaaggtgcgcgtggaccagaaatgcaagtcctcggcccagatagacccgactcccgtgatcgtcacctccaacaccaacatgtgcgccgtgattgacgggaactcaacgaccttcgaacaccagcagccgttgcaagaccggatgttcaaatttgaactcacccgccgtctggatcatgactttgggaaggtcaccaagcaggaagtcaaagactttttccggtgggcaaaggatcacgtggttgaggtggagcatgaattctacgtcaaaaagggtggagccaagaaaagacccgcccccagtgacgcagatataagtgagcccaaacgggtgcgcgagtcagttgcgcagccatcgacgtcagacgcggaagcttcgatcaactacgcagacaggtaccaaaacaaatgttctcgtcacgtgggcatgaatctgatgctgtttccctgcagacaatgcgagagaatgaatcagaattcaaatatctgcttcactcacggacagaaagactgtttagagtgctttcccgtgtcagaatctcaacccgtttctgtcgtcaaaaaggcgtatcagaaactgtgctacattcatcatatcatgggaaaggtgccagacgcttgcactgcctgcgatctggtcaatgtggatttggatgactgcatctttgaacaataaatgatttaaatcaggtatggctgccgatggttatcttccagattggctcgaggacaacctctctgagggcattcgcgagtggtgggcgctgaaacctggagccccgaagcccaaagccaaccagcaaaagcaggacgacggccggggtctggtgcttcctggctacaagtacctcggacccttcaacggactcgacaagggggagcccgtcaacgcggcggacgcagcggccctcgagcacgacaaggcctacgaccagcagctgcaggcgggtgacaatccgtacctgcggtataaccacgccgacgccgagtttcaggagcgtctgcaagaagatacgtcttttgggggcaacctcgggcgagcagtcttccaggccaagaagcgggttctcgaacctctcggtctggttgaggaaggcgctaagacggctcctggaaagaagagaccggtagagccatcaccccagcgttctccagactcctctacgggcatcggcaagaaaggccaacagcccgccagaaaaagactcaattttggtcagactggcgactcagagtcagttccagaccctcaacctctcggagaacctccagcagcgccctctggtgtgggacctaatacaatggctgcaggcggtggcgcaccaatggcagacaataacgaaggcgccgacggagtgggtagttcctcgggaaattggcattgcgattccacatggctgggcgacagagtcatcaccaccagcacccgaacctgggccctgcccacctacaacaaccacctctacaagcaaatctccaacgggacatcgggaggagccaccaacgacaacacctacttcggctacagcaccccctgggggtattttgactttaacagattccactgccacttttcaccacgtgactggcagcgactcatcaacaacaactggggattccggcccaagagactcagcttcaagctcttcaacatccaggtcaaggaggtcacgcagaatgaaggcaccaagaccatcgccaataacctcaccagcaccatccaggtgtttacggactcggagtaccagctgccgtacgttctcggctctgcccaccagggctgcctgcctccgttcccggcggacgtgttcatgattccccagtacggctacctaacactcaacaacggtagtcaggccgtgggacgctcctccttctactgcctggaatactttccttcgcagatgctgagaaccggcaacaacttccagtttacttacaccttcgaggacgtgcctttccacagcagctacgcccacagccagagcttggaccggctgatgaatcctctgattgaccagtacctgtactacttgtctcggactcaaacaacaggaggcacggcaaatacgcagactctgggcttcagccaaggtgggcctaatacaatggccaatcaggcaaagaactggctgccaggaccctgttaccgccaacaacgcgtctcaacgacaaccgggcaaaacaacaatagcaactttgcctggactgctgggaccaaataccatctgaatggaagaaattcattggctaatcctggcatcgctatggcaacacacaaagacgacgaggagcgtttttttcccagtaacgggatcctgatttttggcaaacaaaatgctgccagagacaatgcggattacagcgatgtcatgctcaccagcgaggaagaaatcaaaaccactaaccctgtggctacagaggaatacggtatcgtggcagataacttgcagcagcaaaacacggctcctcaaattggaactgtcaacagccagggggccttacccggtatggtctggcagaaccgggacgtgtacctgcagggtcccatctgggccaagattcctcacacggacggcaacttccacccgtctccgctgatgggcggctttggcctgaaacatcctccgcctcagatcctgatcaagaacacgcctgtacctgcggatcctccgaccaccttcaaccagtcaaagctgaactctttcatcacgcaatacagcaccggacaggtcagcgtggaaattgaatgggagctgcagaaggaaaacagcaagcgctggaaccccgagatccagtacacctccaactactacaaatctacaagtgtggactttgctgttaatacagaaggcgtgtactctgaaccccgccccattggcacccgttacctcacccgtaatctgtaattgcctgttaatcaataaaccggttgattcgtttcagttgaactttggtctctgcgaagggcgaattcgtttaaacctgcaggactagagccgaattctgcatcgcgatagggataacagggtaataaataatgtactagagacactttcaataaaggcaaatgcttttatttgtacactctcgggtgattatttacccccacccttgccgtctgcgccgtttaaaaatcaaaggggttctgccgcgcatcgctatgcgccactggcagggacacgttgcgatactggtgtttagtgctccacttaaactcaggcacaaccatccgcggcagctcggtgaagttttcactccacaggctgcgcaccatcaccaacgcgtttagcaggtcgggcgccgatatcttgaagtcgcagttggggcctccgccctgcgcgcgcgagttgcgatacacagggttgcagcactggaacactatcagcgccgggtggtgcacgctggccagcacgctcttgtcggagatcagatccgcgtccaggtcctccgcgttgctcagggcgaacggagtcaactttggtagctgccttcccaaaaagggcgcgtgcccaggctttgagttgcactcgcaccgtagtggcatcaaaaggtgaccgtgcccggtctgggcgttaggatacagcgcctgcataaaagccttgatctgcttaaaagccacctgagcctttgcgccttcagagaagaacatgccgcaagacttgccggaaaactgattggccggacaggccgcgtcgtgcacgcagcaccttgcgtcggtgttggagatctgcaccacatttcggccccaccggttcttcacgatcttggccttgctagactgctccttcagcgcgcgctgcccgttttcgctcgtcacatccatttcaatcacgtgctccttatttatcataatgcttccgtgtagacacttaagctcgccttcgatctcagcgcagcggtgcagccacaacgcgcagcccgtgggctcgtgatgcttgtaggtcacctctgcaaacgactgcaggtacgcctgcaggaatcgccccatcatcgtcacaaaggtcttgttgctggtgaaggtcagctgcaacccgcggtgctcctcgttcagccaggtcttgcatacggccgccagagcttccacttggtcaggcagtagtttgaagttcgcctttagatcgttatccacgtggtacttgtccatcagcgcgcgcgcagcctccatgcccttctcccacgcagacacgatcggcacactcagcgggttcatcaccgtaatttcactttccgcttcgctgggctcttcctcttcctcttgcgtccgcataccacgcgccactgggtcgtcttcattcagccgccgcactgtgcgcttacctcctttgccatgcttgattagcaccggtgggttgctgaaacccaccatttgtagcgccacatcttctctttcttcctcgctgtccacgattacctctggtgatggcgggcgctcgggcttgggagaagggcgcttctttttcttcttgggcgcaatggccaaatccgccgccgaggtcgatggccgcgggctgggtgtgcgcggcaccagcgcgtcttgtgatgagtcttcctcgtcctcggactcgatacgccgcctcatccgcttttttgggggcgcccggggaggcggcggcgacggggacggggacgacacgtcctccatggttgggggacgtcgcgccgcaccgcgtccgcgctcgggggtggtttcgcgctgctcctcttcccgactggccatttccttctcctataggcagaaaaagatcgttgaaactcactccggggctgtggacgtcggcttaccttcgcaaatttgtacctgaggactaccacgcccacgagattaggttctacgaagaccaatcccgcccgcctaatgcggagcttaccgcctgcgtcattacccagggccacattcttggccaattgcaagccatcaacaaagcccgccaagagtttctgctacgaaagggacggggggtttacttggacccccagtccggcgaggagctcaacccaatccccccgccgccgcagccctatcagcagcagccgcgggcccttgcttcccaggatggcacccaaaaagaagctgcagctgccgccgccacccacggacgaggaggaatactgggacagtcaggcagaggaggttttggacgaggaggaggaggacatgatggaagactgggagagcctagacgaggaagcttccgaggtcgaagaggtgtcagacgaaacaccgtcaccctcggtcgcattcccctcgccggcgccccagaaatcggcaaccggttccagcatggctacaacctccgctcctcaggcgccgccggcactgcccgttcgccgacccaaccgtagatgggacaccactggaaccagggccggtaagtccaagcagccgccgccgttagcccaagagcaacaacagcgccaaggctaccgctcatggcgcgggcacaagaacgccatagttgcttgcttgcaagactgtgggggcaacatctccttcgcccgccgctttcttctctaccatcacggcgtggccttcccccgtaacatcctgcattactaccgtcatctctacagcccatactgcaccggcggcagcggcagcaacagcagcggccacacagaagcaaaggcgaccggatagcaagactctgacaaagcccaagaaatccacagcggcggcagcagcaggaggaggagcgctgcgtctggcgcccaacgaacccgtatcgacccgcgagcttagaaacaggatttttcccactctgtatgctatatttcaacagagcaggggccaagaacaagagctgaaaataaaaaacaggtctctgcgatccctcacccgcagctgcctgtatcacaaaagcgaagatcagcttcggcgcacgctggaagacgcggaggctctcttcagtaaatactgcgcgctgactcttaaggactagtttcgcgccctttctcaaatttaagcgcgaaaactacgtcatctccagcggccacacccggcgccagcacctgttgtcagcgccattttttagggcggagtaacttgtatgtgttgggaattgtagttttcttaaaatgggaagtgacgtaacgtgggaaaacggaagtgacgatttgaggaagttgtgggttttttggctttcgtttctgggcgtaggttcgcgtgcggttttctgggtgttttttgtggactttaaccgttacgtcattttttagtcctatatatactcgctctgcacttggcccttttttacactgtgactgattgagctggtgccgtgtcgagtggtgtttttttaataggttttcttttttactggtaaggctgactgttatgactacgtccggcgttccatttggcatgacactacgaccaacacgatctcggttgtctcggcgcactccgtacagtagggatcgtctacctccttttgagacagaaacccgcgctaccatactggaggatcatccgctgctgcccgaatgtaacactttgacaatgcacaacgtgagttacgtgcgaggtcttccctgcagtgtgggatttacgctgattcaggaatgggttgttccctgggatatggttctaacgcgggaggagcttgtaatcctgaggaagtgtatgcacgtgtgcctgtgttgtgccaacattgatatcatgacgagcatgatgatccatggttacgagtcctgggctctccactgtcattgttccagtcccggttccctgcagtgtatagccggcgggcaggttttggccagctggtttaggatggtggtggatggcgccatgtttaatcagaggtttatatggtaccgggaggtggtgaattacaacatgccaaaagaggtaatgtttatgtccagcgtgtttatgaggggtcgccacttaatctacctgcgcttgtggtatgatggccacgtgggttctgtggtccccgccatgagctttggatacagcgccttgcactgtgggattttgaacaatattgtggtgctgtgctgcagttactgtgctgatttaagtgagatcagggtgcgctgctgtgcccggaggacaaggcgccttatgctgcgggcggtgcgaatcatcgctgaggagaccactgccatgttgtattcctgcaggacggagcggcggcggcagcagtttattcgcgcgctgctgcagcaccaccgccctatcctgatgcacgattatgactctacccccatgtaggtttgattaaggtacggtgatctgtataagctatgtggtggtggggctatactactgaatgaaaaatgacttgaaattttctgcaattgaaaaataaacacgttgaaacataacacaaacgattctttattcttgggcaatgtatgaaaaagtgtaagaggatgtggcaaatatttcattaatgtagttgtggccagaccagtcccatgaaaatgacatagagtatgcacttggagttgtgtctcctgtttcctgtgtaccgtttagtgtaatggttagtgttacaggtttagttttgtctccgtttaagtaaacttgactgacaatgttacttttggcagttttaccgtgagattttggataagctgataggttaggcataaatccaacagcgtttgtataggctgtcgcccctcctgacgcggtaggaggaggggagggtgccctgcatgtctgccgctgctcttgctcttgccgctgctgaggaggggggcgcatctgccgcagcaccggatgcatctgggaaaagcaaaaaaggggctcgtccctgtttccggaggaatttgcaagcggggtcttgcatgacggggaggcaaacccccgttcgccgcagtccggccggtccgagactcgaaccgggggtcccgcgactcaacccttggaaaataaccctccggctacagggagcgagccacttaatgctttcgctttccagcctaaccgcttacgctgcgcgcggccagtggccaaaaaagctagcgcagcagccgccgcgcctggaaggaagccaaaaggagcactcccccgttgtctgacgtcgcacacctgggttcgacacgcgggcggtaaccgcatggatcacggcggacggccggatacggggctcgaaccccggtcgtccgccatgatacccttgcgaatttatccaccagaccacggaagagtgcccgcttacaggctctccttttgcacggtctagagcgtcaacgattgcgcgcgcctgaccggccagagcgtcccgaccatggagcactttttgccgctgcgcaacatctggaaccgcgtccgcgactttccgcgcgcctccaccaccgccgccggcatcacctggatgtccaggtacatctacggatatggcaaacagctattatgggtattatgggtgcggccgcggatcccgggcccgtcgactgcagaggcctgcatgcaagcttggtgtaatcatggtcatagctgtttcctgtgtgaaattgttatccgctcacaattccacacaacatacgagccggaagcataaagtgtaaagcctggggtgcctaatgagtgagctaactcacattaattgcgttgcgctcactgcccgctttccagtcgggaaacctgtcgtgccagctgcattaatgaatcggccaacgcgcggggagaggcggtttgcgtattgggcgctcttccgcttcctcgctcactgactcgctgcgctcggtcgttcggctgcggcgagcggtatcagctcactcaaaggcggtaatacggttatccacagaatcaggggataacgcaggaaagaacatgtgagcaaaaggccagcaaaaggccaggaaccgtaaaaaggccgcgttgctggcgtttttccataggctccgcccccctgacgagcatcacaaaaatcgacgctcaagtcagaggtggcgaaacccgacaggactataaagataccaggcgtttccccctggaagctccctcgtgcgctctcctgttccgaccctgccgcttaccggatacctgtccgcctttctcccttcgggaagcgtggcgctttctcatagctcacgctgtaggtatctcagttcggtgtaggtcgttcgctccaagctgggctgtgtgcacgaaccccccgttcagcccgaccgctgcgccttatccggtaactatcgtcttgagtccaacccggtaagacacgacttatcgccactggcagcagccactggtaacaggattagcagagcgaggtatgtaggcggtgctacagagttcttgaagtggtggcctaactacggctacactagaagaacagtatttggtatctgcgctctgctgaagccagttaccttcggaaaaagagttggtagctcttgatccggcaaacaaaccaccgctggtagcggtggtttttttgtttgcaagcagcagattacgcgcagaaaaaaaggatctcaagaagatcctttgatcttttctacggggtctgacgctcagtggaacgaaaactcacgttaagggattttggtcatgagattatcaaaaaggatcttcacctagaaggtcctgtattagaggtcacgtgagtgttttgcgacattttgcgacaccatgtggtcacgctgggtatttaagcccgagtgagcacgcagggtctccattttgaagcgggaggtttgaacgcgcagccgccatccttttaaattaaaaatgaagttttaaatcaagcccaatctgaataatgttacaaccaattaaccaattctgattagaaaaactcatcgagcatcaaatgaaactgcaatttattcatatcaggattatcaataccatatttttgaaaaagccgtttctgtaatgaaggagaaaactcaccgaggcagttccataggatggcaagatcctggtatcggtctgcgattccgactcgtccaacatcaatacaacctattaatttcccctcgtcaaaaataaggttatcaagtgagaaatcaccatgagtgacgactgaatccggtgagaatggcaaaagtttatgcatttctttccagacttgttcaacaggccagccattacgctcgtcatcaaaatcactcgcatcaaccaaaccgttattcattcgtgattgcgcctgagcgagacgaaatacgcgatcgctgttaaaaggacaattacaaacaggaatcgaatgcaaccggcgcaggaacactgccagcgcatcaacaatattttcacctgaatcaggatattcttctaatacctggaatgctgtttttccggggatcgcagtggtgagtaaccatgcatcatcaggagtacggataaaatgcttgatggtcggaagaggcataaattccgtcagccagtttagtctgaccatctcatctgtaacatcattggcaacgctacctttgccatgtttcagaaacaactctggcgcatcgggcttcccatacaagcgatagattgtcgcacctgattgcccgacattatcgcgagcccatttatacccatataaatcagcatccatgttggaatttaatcgcggcctcgacgtttcccgttgaatatggctcataacaccccttgtattactgtttatgtaagcagacagttttattgttcatgatgatatatttttatcttgtgcaatgtaacatcagagattttgagacacgggccagagctgca

SEQ ID NO: 164 - DNA, 12309 bp, synthetic construct
  source 1..12309: mol_type = other DNA
tcgcgcgtttcggtgatgacggtgaaaacctctgacacatgcagctcccggagacggtcacagcttgtctgtaagcggatgccgggagcagacaagcccgtcagggcgcgtcagcgggtgttggcgggtgtcggggctggcttaactatgcggcatcagagcagattgtactgagagtgcaccatatgcggtgtgaaataccgcacagatgcgtaaggagaaaataccgcatcaggcgccattcgccattcaggctgcgcaactgttgggaagggcgatcggtgcgggcctcttcgctattacgccagctggcgaaagggggatgtgctgcaaggcgattaagttgggtaacgccagggttttcccagtcacgacgttgtaaaacgacggccagagaattccgcagggtctccattttgaagcgggaggtttgaacgcgcagccgccatgccggggttttacgagattgtgattaaggtccccagcgaccttgacgagcatctgcccggcatttctgacagctttgtgaactgggtggccgagaaggaatgggagttgccgccagattctgacatggatctgaatctgattgagcaggcacccctgaccgtggccgagaagctgcagcgcgactttctgacggaatggcgccgtgtgagtaaggccccggaggctcttttctttgtgcaatttgagaagggagagagctacttccacatgcacgtgctcgtggaaaccaccggggtgaaatccatggttttgggacgtttcctgagtcagattcgcgaaaaactgattcagagaatttaccgcgggatcgagccgactttgccaaactggttcgcggtcacaaagaccagaaatggcgccggaggcgggaacaaggtggtggatgagtgctacatccccaattacttgctccccaaaacccagcctgagctccagtgggcgtggactaatatggaacagtatttaagcgcctgtttgaatctcacggagcgtaaacggttggtggcgcagcatctgacgcacgtgtcgcagacgcaggagcagaacaaagagaatcagaatcccaattctgatgcgccggtgatcagatcaaaaacttcagccaggtacatggagctggtcgggtggctcgtggacaaggggattacctcggagaagcagtggatccaggaggaccaggcctcatacatctccttcaatgcggcctccaactcgcggtcccaaatcaaggctgccttggacaatgcgggaaagattatgagcctgactaaaaccgcccccgactacctggtgggccagcagcccgtggaggacatttccagcaatcggatttataaaattttggaactaaacgggtacgatccccaatatgcggcttccgtctttctgggatgggccacgaaaaagttcggcaagaggaacaccatctggctgtttgggcctgcaactaccgggaagaccaacatcgcggaggccatagcccacactgtgcccttctacgggtgcgtaaactggaccaatgagaactttcccttcaacgactgtgtcgacaagatggtgatctggtgggaggaggggaagatgaccgccaaggtcgtggagtcggccaaagccattctcggaggaagcaaggtgcgcgtggaccagaaatgcaagtcctcggcccagatagacccgactcccgtgatcgtcacctccaacaccaacatgtgcgccgtgattgacgggaactcaacgaccttcgaacaccagcagccgttgcaagaccggatgttcaaatttgaactcacccgccgtctggatcatgactttgggaaggtcaccaagcaggaagtcaaagactttttccggtgggcaaaggatcacgtggttgaggtggagcatgaattctacgtcaaaaagggtggagccaagaaaagacccgcccccagtgacgcagatataagtgagcccaaacgggtgcgcgagtcagttgcgcagccatcgacgtcagacgcggaagcttcgatcaactacgcagacaggtaccaaaacaaatgttctcgtcacgtgggcatgaatctgatgctgtttccctgcagacaatgcgagagaatgaatcagaattcaaatatctgcttcactcacggacagaaagactgtttagagtgctttcccgtgtcagaatctcaacccgtttctgtcgtcaaaaaggcgtatcagaaactgtgctacattcatcatatcatgggaaaggtgccagacgcttgcactgcctgcgatctggtcaatgtggatttggatgactgcatctttgaacaataaatgatttaaatcaggtatggctgccgatggttatcttccagattggctcgaggacaacctctctgagggcattcgcgagtggtgggcgctgaaacctggagccccgaagcccaaagccaaccagcaaaagcaggacgacggccggggtctggtgcttcctggctacaagtacctcggacccttcaacggactcgacaagggggagcccgtcaacgcggcggacgcagcggccctcgagcacgacaaggcctacgaccagcagctgcaggcgggtgacaatccgtacctgcggtataaccacgccgacgccgagtttcaggagcgtctgcaagaagatacgtcttttgggggcaacctcgggcgagcagtcttccaggccaagaagcgggttctcgaacctctcggtctggttgaggaaggcgctaagacggctcctggaaagaagagaccggtagagccatcaccccagcgttctccagactcctctacgggcatcggcaagaaaggccaacagcccgccagaaaaagactcaattttggtcagactggcgactcagagtcagttccagaccctcaacctctcggagaacctccagcagcgccctctggtgtgggacctaatacaatggctgcaggcggtggcgcaccaatggcagacaataacgaaggcgccgacggagtgggtagttcctcgggaaattggcattgcgattccacatggctgggcgacagagtcatcaccaccagcacccgaacctgggccctgcccacctacaacaaccacctctacaagcaaatctccaacgggacatcgggaggagccaccaacgacaacacctacttcggctacagcaccccctgggggtattttgactttaacagattccactgccacttttcaccacgtgactggcagcgactcatcaacaacaactggggattccggcccaagagactcagcttcaagctcttcaacatccaggtcaaggaggtcacgcagaatgaaggcaccaagaccatcgccaataacctcaccagcaccatccaggtgtttacggactcggagtaccagctgccgtacgttctcggctctgcccaccagggctgcctgcctccgttcccggcggacgtgttcatgattccccagtacggctacctaacactcaacaacggtagtcaggccgtgggacgctcctccttctactgcctggaatactttccttcgcagatgctgagaaccggcaacaacttccagtttacttacaccttcgaggacgtgcctttccacagcagctacgcccacagccagagcttggaccggctgatgaatcctctgattgaccagtacctgtactacttgtctcggactcaaacaacaggaggcacggcaaatacgcagactctgggcttcagccaaggtgggcctaatacaatggccaatcaggcaaagaactggctgccaggaccctgttaccgccaacaacgcgtctcaacgacaaccgggcaaaacaacaatagcaactttgcctggactgctgggaccaaataccatctgaatggaagaaattcattggctaatcctggcatcgctatggcaacacacaaagacgacgaggagcgtttttttcccagtaacgggatcctgatttttggcaaacaaaatgctgccagagacaatgcggattacagcgatgtcatgctcaccagcgaggaagaaatcaaaaccactaaccctgtggctacagaggaatacggtatcgtggcagataacttgcagcagcaaaacacggctcctcaaattggaactgtcaacagccagggggccttacccggtatggtctggcagaaccgggacgtgtacctgcagggtcccatctgggccaagattcctcacacggacggcaacttccacccgtctccgctgatgggcggctttggcctgaaacatcctccgcctcagatcctgatcaagaacacgcctgtacctgcggatcctccgaccaccttcaaccagtcaaagctgaactctttcatcacgcaatacagcaccggacaggtcagcgtggaaattgaatgggagctgcagaaggaaaacagcaagcgctggaaccccgagatccagtacacctccaactactacaaatctacaagtgtggactttgctgttaatacagaaggcgtgtactctgaaccccgccccattggcacccgttacctcacccgtaatctgtaattgcctgttaatcaataaaccggttgattcgtttcagttgaactttggtctctgcgaagggcgaattcgtttaaacctgcaggactagagccgaattctgcatcgcgatagggataacagggtaataaataatgtactagagacactttcaataaaggcaaatgcttttatttgtacactctcgggtgattatttacccccacccttgccgtctgcgccgttcagaagtcgaaggggttctgtctggcatcggaatgggccacgggcagagacacgttccggtactggtgcttggtggaccacttgaactcaggcacgaccattctaggcagctctgtgaagttctcgctccacaggctccgcaccatcaccagggcgttcagcaggtcaggggcgctgattttgaagtcgcagttaggtccgccgccctgggctctgctgtttctgtacacagggttgcagcactggaacacaataagagcagggtggtgcacgctggccagcacagacttgtcgctgatcaggtcggcgtcgagatcctcggcgttagacaaggcaaaaggggtcagcttgggcagctggcggcccaggaaaggggcgtggccgggcttgctattgcactcgcatctcagaggcatcagcaggtggccgtggccggtctgggcgttggggtacagggcctgcataaaggccttgatctgtttgaaggccacttgggccttggcgccttcggagaagaacatgccgcagcttttgccgctgaactggttggcggggcaggcggcgtcgtgcacacaacaccgggcgtcggtattgctgatctgcaccacgtttctgccccatctgttcttcacgatcttggccttgctgctctgctctttcagggccctctggccgttctcagaggtgacgtccatctcgatcacatgttccttgttgatcatgatgctgccgtgcagacacttcagctcgccctcgatttccgcgcatctgtgcagccacagggcacaaccggtaggctcgtggtgcttgtatgtcacctcagcaaaagattgcaggtaggcttgcaggaatctgcccatcatggtcacgaaggtcttgttggaggtaaaagtcagctgcagtcctctgtgttcctcgttcagccatgtcttgcacacggcggccagagcctcgacctgatctggcagcagcttgaaattagccttcaggtcgttgtccacgtgatacttatccatcagtgctctggcggcttccatgcccttctcccaggcggaaacgatgggcacgctcagggggttcatcacggtgatctcgctttcagcttctgaaggttcctcctcttcctcctgtgttctcatgccccgagccacggggtcgtcctcattcagtctccgcacggttctttttcctccctttccgtgcttaatcagtacaggaggattagagaagcccaccatctggagggcgacgtcctccctttcttcttcgctatccacgatcacttctgggctggggggccgttcaggctttgggctaggccgtttttttttcttcttaggggcgatagccagatcagcggcgcttgtagagggccgaggactaggggttctaggcacgagggcgtcctggctgctgtcctcctcatcctcgctctcgatccgtctccgcattctcttcttagggggggcccgcggagggggagggctagggctaggggacgacacatcttccatggttggaggtctgcgagcagcgcctctgcctctctctggtgttgtctcgcgctgttcttcctctctagaggccatttccttctcctataggcagaaaaagatcgttgaaactcactccggggctgtggacgtcggcttaccttcgcaaatttgtacctgaggactaccacgcccacgagattaggttctacgaagaccaatcccgcccgcctaatgcggagcttaccgcctgcgtcattacccagggccacattcttggccaattgcaagccatcaacaaagcccgccaagagtttctgctacgaaagggacggggggtttacttggacccccagtccggcgaggagctcaacccaatccccccgccgccgcagccctatcagcagcagccgcgggcccttgcttcccaggatggcacccaaaaagaagctgcagctgccgccgccacccacggacgaggaggaatactgggacagtcaggcagaggaggttttggacgaggaggaggaggacatgatggaagactgggagagcctagacgaggaagcttccgaggtcgaagaggtgtcagacgaaacaccgtcaccctcggtcgcattcccctcgccggcgccccagaaatcggcaaccggttccagcatggctacaacctccgctcctcaggcgccgccggcactgcccgttcgccgacccaaccgtagatgggacaccactggaaccagggccggtaagtccaagcagccgccgccgttagcccaagagcaacaacagcgccaaggctaccgctcatggcgcgggcacaagaacgccatagttgcttgcttgcaagactgtgggggcaacatctccttcgcccgccgctttcttctctaccatcacggcgtggccttcccccgtaacatcctgcattactaccgtcatctctacagcccatactgcaccggcggcagcggcagcaacagcagcggccacacagaagcaaaggcgaccggatagcaagactctgacaaagcccaagaaatccacagcggcggcagcagcaggaggaggagcgctgcgtctggcgcccaacgaacccgtatcgacccgcgagcttagaaacaggatttttcccactctgtatgctatatttcaacagagcaggggccaagaacaagagctgaaaataaaaaacaggtctctgcgatccctcacccgcagctgcctgtatcacaaaagcgaagatcagcttcggcgcacgctggaagacgcggaggctctcttcagtaaatactgcgcgctgactcttaaggactagtttcgcgccctttctcaaatttaagcgcgaaaactacgtcatctccagcggccacacccggcgccagcacctgttgtcagcgccattttttagggcggagtaacttgtatgtgttgggaattgtagttttcttaaaatgggaagtgacgtaacgtgggaaaacggaagtgacgatttgaggaagttgtgggttttttggctttcgtttctgggcgtaggttcgcgtgcggttttctgggtgttttttgtggactttaaccgttacgtcattttttagtcctatatatactcgctctgcacttggcccttttttacactgtgactgattgagctggtgccgtgtcgagtggtgtttttttaataggttttcttttttactggtaaggctgactgttatgactacgtccggcgttccatttggcatgacactacgaccaacacgatctcggttgtctcggcgcactccgtacagtagggatcgtctacctccttttgagacagaaacccgcgctaccatactggaggatcatccgctgctgcccgaatgtaacactttgacaatgcacaacgtgagttacgtgcgaggtcttccctgcagtgtgggatttacgctgattcaggaatgggttgttccctgggatatggttctaacgcgggaggagcttgtaatcctgaggaagtgtatgcacgtgtgcctgtgttgtgccaacattgatatcatgacgagcatgatgatccatggttacgagtcctgggctctccactgtcattgttccagtcccggttccctgcagtgtatagccggcgggcaggttttggccagctggtttaggatggtggtggatggcgccatgtttaatcagaggtttatatggtaccgggaggtggtgaattacaacatgccaaaagaggtaatgtttatgtccagcgtgtttatgaggggtcgccacttaatctacctgcgcttgtggtatgatggccacgtgggttctgtggtccccgccatgagctttggatacagcgccttgcactgtgggattttgaacaatattgtggtgctgtgctgcagttactgtgctgatttaagtgagatcagggtgcgctgctgtgcccggaggacaaggcgccttatgctgcgggcggtgcgaatcatcgctgaggagaccactgccatgttgtattcctgcaggacggagcggcggcggcagcagtttattcgcgcgctgctgcagcaccaccgccctatcctgatgcacgattatgactctacccccatgtaggtttgattaaggtacggtgatctgtataagctatgtggtggtggggctatactactgaatgaaaaatgacttgaaattttctgcaattgaaaaataaacacgttgaaacataacacaaacgattctttattcttgggcaatgtatgaaaaagtgtaagaggatgtggcaaatatttcattaatgtagttgtggccagaccagtcccatgaaaatgacatagagtatgcacttggagttgtgtctcctgtttcctgtgtaccgtttagtgtaatggttagtgttacaggtttagttttgtctccgtttaagtaaacttgactgacaatgttacttttggcagttttaccgtgagattttggataagctgataggttaggcataaatccaacagcgtttgtataggctgtcgcccctcctgacgcggtaggaggaggggagggtgccctgcatgtctgccgctgctcttgctcttgccgctgctgaggaggggggcgcatctgccgcagcaccggatgcatctgggaaaagcaaaaaaggggctcgtccctgtttccggaggaatttgcaagcggggtcttgcatgacggggaggcaaacccccgttcgccgcagtccggccggtccgagactcgaaccgggggtcccgcgactcaacccttggaaaataaccctccggctacagggagcgagccacttaatgctttcgctttccagcctaaccgcttacgctgcgcgcggccagtggccaaaaaagctagcgcagcagccgccgcgcctggaaggaagccaaaaggagcactcccccgttgtctgacgtcgcacacctgggttcgacacgcgggcggtaaccgcatggatcacggcggacggccggatacggggctcgaaccccggtcgtccgccatgatacccttgcgaatttatccaccagaccacggaagagtgcccgcttacaggctctccttttgcacggtctagagcgtcaacgattgcgcgcgcctgaccggccagagcgtcccgaccatggagcactttttgccgctgcgcaacatctggaaccgcgtccgcgactttccgcgcgcctccaccaccgccgccggcatcacctggatgtccaggtacatctacggatatggcaaacagctattatgggtattatgggtgcggccgcggatcccgggcccgtcgactgcagaggcctgcatgcaagcttggtgtaatcatggtcatagctgtttcctgtgtgaaattgttatccgctcacaattccacacaacatacgagccggaagcataaagtgtaaagcctggggtgcctaatgagtgagctaactcacattaattgcgttgcgctcactgcccgctttccagtcgggaaacctgtcgtgccagctgcattaatgaatcggccaacgcgcggggagaggcggtttgcgtattgggcgctcttccgcttcctcgctcactgactcgctgcgctcggtcgttcggctgcggcgagcggtatcagctcactcaaaggcggtaatacggttatccacagaatcaggggataacgcaggaaagaacatgtgagcaaaaggccagcaaaaggccaggaaccgtaaaaaggccgcgttgctggcgtttttccataggctccgcccccctgacgagcatcacaaaaatcgacgctcaagtcagaggtggcgaaacccgacaggactataaagataccaggcgtttccccctggaagctccctcgtgcgctctcctgttccgaccctgccgcttaccggatacctgtccgcctttctcccttcgggaagcgtggcgctttctcatagctcacgctgtaggtatctcagttcggtgtaggtcgttcgctccaagctgggctgtgtgcacgaaccccccgttcagcccgaccgctgcgccttatccggtaactatcgtcttgagtccaacccggtaagacacgacttatcgccactggcagcagccactggtaacaggattagcagagcgaggtatgtaggcggtgctacagagttcttgaagtggtggcctaactacggctacactagaagaacagtatttggtatctgcgctctgctgaagccagttaccttcggaaaaagagttggtagctcttgatccggcaaacaaaccaccgctggtagcggtggtttttttgtttgcaagcagcagattacgcgcagaaaaaaaggatctcaagaagatcctttgatcttttctacggggtctgacgctcagtggaacgaaaactcacgttaagggattttggtcatgagattatcaaaaaggatcttcacctagaaggtcctgtattagaggtcacgtgagtgttttgcgacattttgcgacaccatgtggtcacgctgggtatttaagcccgagtgagcacgcagggtctccattttgaagcgggaggtttgaacgcgcagccgccatccttttaaattaaaaatgaagttttaaatcaagcccaatctgaataatgttacaaccaattaaccaattctgattagaaaaactcatcgagcatcaaatgaaactgcaatttattcatatcaggattatcaataccatatttttgaaaaagccgtttctgtaatgaaggagaaaactcaccgaggcagttccataggatggcaagatcctggtatcggtctgcgattccgactcgtccaacatcaatacaacctattaatttcccctcgtcaaaaataaggttatcaagtgagaaatcaccatgagtgacgactgaatccggtgagaatggcaaaagtttatgcatttctttccagacttgttcaacaggccagccattacgctcgtcatcaaaatcactcgcatcaaccaaaccgttattcattcgtgattgcgcctgagcgagacgaaatacgcgatcgctgttaaaaggacaattacaaacaggaatcgaatgcaaccggcgcaggaacactgccagcgcatcaacaatattttcacctgaatcaggatattcttctaatacctggaatgctgtttttccggggatcgcagtggtgagtaaccatgcatcatcaggagtacggataaaatgcttgatggtcggaagaggcataaattccgtcagccagtttagtctgaccatctcatctgtaacatcattggcaacgctacctttgccatgtttcagaaacaactctggcgcatcgggcttcccatacaagcgatagattgtcgcacctgattgcccgacattatcgcgagcccatttatacccatataaatcagcatccatgttggaatttaatcgcggcctcgacgtttcccgttgaatatggctcataacaccccttgtattactgtttatgtaagcagacagttttattgttcatgatgatatatttttatcttgtgcaatgtaacatcagagattttgagacacgggccagagctgca

SEQ ID NO: 165 - DNA, 5505 bp, synthetic construct; identical to SEQ ID NO: 25
  source 1..5505: mol_type = other DNA

SEQ ID NO: 166 - DNA, 2208 bp, synthetic construct
  source 1..2208: mol_type = other DNA
atggctgccgatggttatcttccagattggctcgaggacactctctctgaaggaataagacagtggtggaagctcaaacctggcccaccaccaccaaagcccgcagagcggcataaggacgacagcaggggtcttgtgcttcctgggtacaagtacctcggacccttcaacggactcgacaagggagagccggtgaacgaggcagacgccgcggccctcgagcacgacaaagcctacgaccggcagctcgacagcggagacaacccgtacctcaagtacaaccacgccgacgcggagtttcaggagcgccttaaagaagatacgtcttttgggggcaacctcggacgagcagtcttccaggcgaaaaagagggttcttgaacctctgggcctggttgaggaacctgttaagacggctccgggaaaaaagaggccggtagagcactctcctgtggagccagactcctcctcgggaaccggaaaggcgggccagcagcctgcaagaaaaagattgaattttggtcagactggagacgcagactcagtacctgacccccagcctctcggacagccaccagcagccccctctggtctgggaactaatacgatggctacaggcagtggcgcaccaatggcagacaataacgagggcgccgacggagtgggtaattcctcgggaaattggcattgcgattccacatggatgggcgacagagtcatcaccaccagcacccgaacctgggccctgcccacctacaacaaccacctctacaaacaaatttccagccaatcaggagcctcgaacgacaatcactactttggctacagcaccccttgggggtattttgacttcaacagattccactgccacttttcaccacgtgactggcaaagactcatcaacaacaactggggattccgacccaagagactcaacttcaagctctttaacattcaagtcaaagaggtcacgcagaatgacggtacgacgacgattgccaataaccttaccagcacggttcaggtgtttactgactcggagtaccagctcccgtacgtcctcggctcggcgcatcaaggatgcctcccgccgttcccagcagacgtcttcatggtgccacagtatggatacctcaccctgaacaacgggagtcaggcagtaggacgctcttcattttactgcctggagtactttccttctcagatgctgcgtaccggaaacaactttaccttcagctacacttttgaggacgttcctttccacagcagctacgctcacagccagagtctggaccgtctcatgaatcctctcatcgaccagtacctgtattacttgagcagaacaaacactccaagtggaaccaccacgcagtcaaggcttcagttttctcaggccggagcgagtgacattcgggaccagtctaggaactggcttcctggaccctgttaccgccagcagcgagtatcaaagacatctgcggataacaacaacagtgaatactcgtggactggagctaccaagtaccacctcaatggcagagactctctggtgaatccgggcccggccatggcaagccacaaggacgatgaagaaaagttttttcctcagagcggggttctcatctttgggaagcaaggctcagagaaaacaaatgtggacattgaaaaggtcatgattacagacgaagaggaaatcaggacaaccaatcccgtggctacggagcagtatggttctgtatctaccaacctccagagaggcaacagacaagcagctaccgcagatgtcaacacacaaggcgttcttccaggcatggtctggcaggacagagatgtgtaccttcaggggcccatctgggcaaagattccacacacggacggacattttcacccctctcccctcatgggtggattcggacttaaacaccctcctccacagattctcatcaagaacaccccggtacctgcgaatccttcgaccaccttcagtgcggcaaagtttgcttccttcatcacacagtactccacgggacaggtcagcgtggagatcgagtgggagctgcagaaggaaaacagcaaacgctggaatcccgaaattcagtacacttccaactacaacaagtctgttaatgtggactttactgtggacactaatggcgtgtattcagagcctcgccccattggcaccagatacctgactcgtaatctgtaa

SEQ ID NO: 167 - DNA, 4090 bp, synthetic construct
  source 1..4090: mol_type = other DNA
atgccggggttttacgagattgtgattaaggtccccagcgaccttgacgagcatctgcccggcatttctgacagctttgtgaactgggtggccgagaaggaatgggagttgccgccagattctgacatggatctgaatctgattgagcaggcacccctgaccgtggccgagaagctgcagcgcgactttctgacggaatggcgccgtgtgagtaaggccccggaggctcttttctttgtgcaatttgagaagggagagagctacttccacatgcacgtgctcgtggaaaccaccggggtgaaatccatggttttgggacgtttcctgagtcagattcgcgaaaaactgattcagagaatttaccgcgggatcgagccgactttgccaaactggttcgcggtcacaaagaccagaaatggcgccggaggcgggaacaaggtggtggatgagtgctacatccccaattacttgctccccaaaacccagcctgagctccagtgggcgtggactaatatggaacagtatttaagcgcctgtttgaatctcacggagcgtaaacggttggtggcgcagcatctgacgcacgtgtcgcagacgcaggagcagaacaaagagaatcagaatcccaattctgatgcgccggtgatcagatcaaaaacttcagccaggtacatggagctggtcgggtggctcgtggacaaggggattacctcggagaagcagtggatccaggaggaccaggcctcatacatctccttcaatgcggcctccaactcgcggtcccaaatcaaggctgccttggacaatgcgggaaagattatgagcctgactaaaaccgcccccgactacctggtgggccagcagcccgtggaggacatttccagcaatcggatttataaaattttggaactaaacgggtacgatccccaatatgcggcttccgtctttctgggatgggccacgaaaaagttcggcaagaggaacaccatctggctgtttgggcctgcaactaccgggaagaccaacatcgcggaggccatagcccacactgtgcccttctacgggtgcgtaaactggaccaatgagaactttcccttcaacgactgtgtcgacaagatggtgatctggtgggaggaggggaagatgaccgccaaggtcgtggagtcggccaaagccattctcggaggaagcaaggtgcgcgtggaccagaaatgcaagtcctcggcccagatagacccgactcccgtgatcgtcacctccaacaccaacatgtgcgccgtgattgacgggaactcaacgaccttcgaacaccagcagccgttgcaagaccggatgttcaaatttgaactcacccgccgtctggatcatgactttgggaaggtcaccaagcaggaagtcaaagactttttccggtgggcaaaggatcacgtggttgaggtggagcatgaattctacgtcaaaaagggtggagccaagaaaagacccgcccccagtgacgcagatataagtgagcccaaacgggtgcgcgagtcagttgcgcagccatcgacgtcagacgcggaagcttcgatcaactacgcagacaggtaccaaaacaaatgttctcgtcacgtgggcatgaatctgatgctgtttccctgcagacaatgcgagagaatgaatcagaattcaaatatctgcttcactcacggacagaaagactgtttagagtgctttcccgtgtcagaatctcaacccgtttctgtcgtcaaaaaggcgtatcagaaactgtgctacattcatcatatcatgggaaaggtgccagacgcttgcactgcctgcgatctggtcaatgtggatttggatgactgcatctttgaacaataaatgatttaaatcaggtatggctgccgatggttatcttccagattggctcgaggacactctctctgaaggaataagacagtggtggaagctcaaacctggcccaccaccaccaaagcccgcagagcggcataaggacgacagcaggggtcttgtgcttcctgggtacaagtacctcggacccttcaacggactcgacaagggagagccggtgaacgaggcagacgccgcggccctcgagcacgacaaagcctacgaccggcagctcgacagcggagacaacccgtacctcaagtacaaccacgccgacgcggagtttcaggagcgccttaaagaagatacgtcttttgggggcaacctcggacgagcagtcttccaggcgaaaaagagggttcttgaacctctgggcctggttgaggaacctgttaagacggctccgggaaaaaagaggccggtagagcactctcctgtggagccagactcctcctcgggaaccggaaaggcgggccagcagcctgcaagaaaaagattgaattttggtcagactggagacgcagactcagtacctgacccccagcctctcggacagccaccagcagccccctctggtctgggaactaatacgatggctacaggcagtggcgcaccaatggcagacaataacgagggcgccgacggagtgggtaattcctcgggaaattggcattgcgattccacatggatgggcgacagagtcatcaccaccagcacccgaacctgggccctgcccacctacaacaaccacctctacaaacaaatttccagccaatcaggagcctcgaacgacaatcactactttggctacagcaccccttgggggtattttgacttcaacagattccactgccacttttcaccacgtgactggcaaagactcatcaacaacaactggggattccgacccaagagactcaacttcaagctctttaacattcaagtcaaagaggtcacgcagaatgacggtacgacgacgattgccaataaccttaccagcacggttcaggtgtttactgactcggagtaccagctcccgtacgtcctcggctcggcgcatcaaggatgcctcccgccgttcccagcagacgtcttcatggtgccacagtatggatacctcaccctgaacaacgggagtcaggcagtaggacgctcttcattttactgcctggagtactttccttctcagatgctgcgtaccggaaacaactttaccttcagctacacttttgaggacgttcctttccacagcagctacgctcacagccagagtctggaccgtctcatgaatcctctcatcgaccagtacctgtattacttgagcagaacaaacactccaagtggaaccaccacgcagtcaaggcttcagttttctcaggccggagcgagtgacattcgggaccagtctaggaactggcttcctggaccctgttaccgccagcagcgagtatcaaagacatctgcggataacaacaacagtgaatactcgtggactggagctaccaagtaccacctcaatggcagagactctctggtgaatccgggcccggccatggcaagccacaaggacgatgaagaaaagttttttcctcagagcggggttctcatctttgggaagcaaggctcagagaaaacaaatgtggacattgaaaaggtcatgattacagacgaagaggaaatcaggacaaccaatcccgtggctacggagcagtatggttctgtatctaccaacctccagagaggcaacagacaagcagctaccgcagatgtcaacacacaaggcgttcttccaggcatggtctggcaggacagagatgtgtaccttcaggggcccatctgggcaaagattccacacacggacggacattttcacccctctcccctcatgggtggattcggacttaaacaccctcctccacagattctcatcaagaacaccccggtacctgcgaatccttcgaccaccttcagtgcggcaaagtttgcttccttcatcacacagtactccacgggacaggtcagcgtggagatcgagtgggagctgcagaaggaaaacagcaaacgctggaatcccgaaattcagtacacttccaactacaacaagtctgttaatgtggactttactgtggacactaatggcgtgtattcagagcctcgccccattggcaccagatacctgactcgtaatctgtaa

SEQ ID NO: 168 - DNA, 9816 bp, synthetic construct
  source 1..9816: mol_type = other DNA
atgccggggttttacgagattgtgattaaggtccccagcgaccttgacgagcatctgcccggcatttctgacagctttgtgaactgggtggccgagaaggaatgggagttgccgccagattctgacatggatctgaatctgattgagcaggcacccctgaccgtggccgagaagctgcagcgcgactttctgacggaatggcgccgtgtgagtaaggccccggaggctcttttctttgtgcaatttgagaagggagagagctacttccacatgcacgtgctcgtggaaaccaccggggtgaaatccatggttttgggacgtttcctgagtcagattcgcgaaaaactgattcagagaatttaccgcgggatcgagccgactttgccaaactggttcgcggtcacaaagaccagaaatggcgccggaggcgggaacaaggtggtggatgagtgctacatccccaattacttgctccccaaaacccagcctgagctccagtgggcgtggactaatatggaacagtatttaagcgcctgtttgaatctcacggagcgtaaacggttggtggcgcagcatctgacgcacgtgtcgcagacgcaggagcagaacaaagagaatcagaatcccaattctgatgcgccggtgatcagatcaaaaacttcagccaggtacatggagctggtcgggtggctcgtggacaaggggattacctcggagaagcagtggatccaggaggaccaggcctcatacatctccttcaatgcggcctccaactcgcggtcccaaatcaaggctgccttggacaatgcgggaaagattatgagcctgactaaaaccgcccccgactacctggtgggccagcagcccgtggaggacatttccagcaatcggatttataaaattttggaactaaacgggtacgatccccaatatgcggcttccgtctttctgggatgggccacgaaaaagttcggcaagaggaacaccatctggctgtttgggcctgcaactaccgggaagaccaacatcgcggaggccatagcccacactgtgcccttctacgggtgcgtaaactggaccaatgagaactttcccttcaacgactgtgtcgacaagatggtgatctggtgggaggaggggaagatgaccgccaaggtcgtggagtcggccaaagccattctcggaggaagcaaggtgcgcgtggaccagaaatgcaagtcctcggcccagatagacccgactcccgtgatcgtcacctccaacaccaacatgtgcgccgtgattgacgggaactcaacgaccttcgaacaccagcagccgttgcaagaccggatgttcaaatttgaactcacccgccgtctggatcatgactttgggaaggtcaccaagcaggaagtcaaagactttttccggtgggcaaaggatcacgtggttgaggtggagcatgaattctacgtcaaaaagggtggagccaagaaaagacccgcccccagtgacgcagatataagtgagcccaaacgggtgcgcgagtcagttgcgcagccatcgacgtcagacgcggaagcttcgatcaactacgcagacaggtaccaaaacaaatgttctcgtcacgtgggcatgaatctgatgctgtttccctgcagacaatgcgagagaatgaatcagaattcaaatatctgcttcactcacggacagaaagactgtttagagtgctttcccgtgtcagaatctcaacccgtttctgtcgtcaaaaaggcgtatcagaaactgtgctacattcatcatatcatgggaaaggtgccagacgcttgcactgcctgcgatctggtcaatgtggatttggatgactgcatctttgaacaataaatgatttaaatcaggtatggctgccgatggttatcttccagattggctcgaggacactctctctgaaggaataagacagtggtggaagctcaaacctggcccaccaccaccaaagcccgcagagcggcataaggacgacagcaggggtcttgtgcttcctgggtacaagtacctcggacccttcaacggactcgacaagggagagccggtgaacgaggcagacgccgcggccctcgagcacgacaaagcctacgaccggcagctcgacagcggagacaacccgtacctcaagtacaaccacgccgacgcggagtttcaggagcgccttaaagaagatacgtcttttgggggcaacctcggacgagcagtcttccaggcgaaaaagagggttcttgaacctctgggcctggttgaggaacctgttaagacggctccgggaaaaaagaggccggtagagcactctcctgtggagccagactcctcctcgggaaccggaaaggcgggccagcagcctgcaagaaaaagattgaattttggtcagactggagacgcagactcagtacctgacccccagcctctcggacagccaccagcagccccctctggtctgggaactaatacgatggctacaggcagtggcgcaccaatggcagacaataacgagggcgccgacggagtgggtaattcctcgggaaattggcattgcgattccacatggatgggcgacagagtcatcaccaccagcacccgaacctgggccctgcccacctacaacaaccacctctacaaacaaatttccagccaatcaggagcctcgaacgacaatcactactttggctacagcaccccttgggggtattttgacttcaacagattccactgccacttttcaccacgtgactggcaaagactcatcaacaacaactggggattccgacccaagagactcaacttcaagctctttaacattcaagtcaaagaggtcacgcagaatgacggtacgacgacgattgccaataaccttaccagcacggttcaggtgtttactgactcggagtaccagctcccgtacgtcctcggctcggcgcatcaaggatgcctcccgccgttcccagcagacgtcttcatggtgccacagtatggatacctcaccctgaacaacgggagtcaggcagtaggacgctcttcattttactgcctggagtactttccttctcagatgctgcgtaccggaaacaactttaccttcagctacacttttgaggacgttcctttccacagcagctacgctcacagccagagtctggaccgtctcatgaatcctctcatcgaccagtacctgtattacttgagcagaacaaacactccaagtggaaccaccacgcagtcaaggcttcagttttctcaggccggagcgagtgacattcgggaccagtctaggaactggcttcctggaccctgttaccgccagcagcgagtatcaaagacatctgcggataacaacaacagtgaatactcgtggactggagctaccaagtaccacctcaatggcagagactctctggtgaatccgggcccggccatggcaagccacaaggacgatgaagaaaagttttttcctcagagcggggttctcatctttgggaagcaaggctcagagaaaacaaatgtggacattgaaaaggtcatgattacagacgaagaggaaatcaggacaaccaatcccgtggctacggagcagtatggttctgtatctaccaacctccagagaggcaacagacaagcagctaccgcagatgtcaacacacaaggcgttcttccaggcatggtctggcaggacagagatgtgtaccttcaggggcccatctgggcaaagattccacacacggacggacattttcacccctctcccctcatgggtggattcggacttaaacaccctcctccacagattctcatcaagaacaccccggtacctgcgaatccttcgaccaccttcagtgcggcaaagtttgcttccttcatcacacagtactccacgggacaggtcagcgtggagatcgagtgggagctgcagaaggaaaacagcaaacgctggaatcccgaaattcagtacacttccaactacaacaagtctgttaatgtggactttactgtggacactaatggcgtgtattcagagcctcgccccattggcaccagatacctgactcgtaatctgtaattgcctgttaatcaataaaccggttgattcgtttcagttgaactttggtctctgcgaagggcgaattcgtttaaacctgcaggactagagccgaattctgcatcgcgatagggataacagggtaataaataatgtactagagacactttcaataaaggcaaatgcttttatttgtacactctcgggtgattatttacccccacccttgccgtctgcgccgtttaaaaatcaaaggggttctgccgcgcatcgctatgcgccactggcagggacacgttgcgatactggtgtttagtgctccacttaaactcaggcacaaccatccgcggcagctcggtgaagttttcactccacaggctgcgcaccatcaccaacgcgtttagcaggtcgggcgccgatatcttgaagtcgcagttggggcctccgccctgcgcgcgcgagttgcgatacacagggttgcagcactggaacactatcagcgccgggtggtgcacgctggccagcacgctcttgtcggagatcagatccgcgtccaggtcctccgcgttgctcagggcgaacggagtcaactttggtagctgccttcccaaaaagggcgcgtgcccaggctttgagttgcactcgcaccgtagtggcatcaaaaggtgaccgtgcccggtctgggcgttaggatacagcgcctgcataaaagccttgatctgcttaaaagccacctgagcctttgcgccttcagagaagaacatgccgcaagacttgccggaaaactgattggccggacaggccgcgtcgtgcacgcagcaccttgcgtcggtgttggagatctgcaccacatttcggccccaccggttcttcacgatcttggccttgctagactgctccttcagcgcgcgctgcccgttttcgctcgtcacatccatttcaatcacgtgctccttatttatcataatgcttccgtgtagacacttaagctcgccttcgatctcagcgcagcggtgcagccacaacgcgcagcccgtgggctcgtgatgcttgtaggtcacctctgcaaacgactgcaggtacgcctgcaggaatcgccccatcatcgtcacaaaggtcttgttgctggtgaaggtcagctgcaacccgcggtgctcctcgttcagccaggtcttgcatacggccgccagagcttccacttggtcaggcagtagtttgaagttcgcctttagatcgttatccacgtggtacttgtccatcagcgcgcgcgcagcctccatgcccttctcccacgcagacacgatcggcacactcagcgggttcatcaccgtaatttcactttccgcttcgctgggctcttcctcttcctcttgcgtccgcataccacgcgccactgggtcgtcttcattcagccgccgcactgtgcgcttacctcctttgccatgcttgattagcaccggtgggttgctgaaacccaccatttgtagcgccacatcttctctttcttcctcgctgtccacgattacctctggtgatggcgggcgctcgggcttgggagaagggcgcttctttttcttcttgggcgcaatggccaaatccgccgccgaggtcgatggccgcgggctgggtgtgcgcggcaccagcgcgtcttgtgatgagtcttcctcgtcctcggactcgatacgccgcctcatccgcttttttgggggcgcccggggaggcggcggcgacggggacggggacgacacgtcctccatggttgggggacgtcgcgccgcaccgcgtccgcgctcgggggtggtttcgcgctgctcctcttcccgactggccatttccttctcctataggcagaaaaagatcgttgaaactcactccggggctgtggacgtcggcttaccttcgcaaatttgtacctgaggactaccacgcccacgagattaggttctacgaagaccaatcccgcccgcctaatgcggagcttaccgcctgcgtcattacccagggccacattcttggccaattgcaagccatcaacaaagcccgccaagagtttctgctacgaaagggacggggggtttacttggacccccagtccggcgaggagctcaacccaatccccccgccgccgcagccctatcagcagcagccgcgggcccttgcttcccaggatggcacccaaaaagaagctgcagctgccgccgccacccacggacgaggaggaatactgggacagtcaggcagaggaggttttggacgaggaggaggaggacatgatggaagactgggagagcctagacgaggaagcttccgaggtcgaagaggtgtcagacgaaacaccgtcaccctcggtcgcattcccctcgccggcgccccagaaatcggcaaccggttccagcatggctacaacctccgctcctcaggcgccgccggcactgcccgttcgccgacccaaccgtagatgggacaccactggaaccagggccggtaagtccaagcagccgccgccgttagcccaagagcaacaacagcgccaaggctaccgctcatggcgcgggcacaagaacgccatagttgcttgcttgcaagactgtgggggcaacatctccttcgcccgccgctttcttctctaccatcacggcgtggccttcccccgtaacatcctgcattactaccgtcatctctacagcccatactgcaccggcggcagcggcagcaacagcagcggccacacagaagcaaaggcgaccggatagcaagactctgacaaagcccaagaaatccacagcggcggcagcagcaggaggaggagcgctgcgtctggcgcccaacgaacccgtatcgacccgcgagcttagaaacaggatttttcccactctgtatgctatatttcaacagagcaggggccaagaacaagagctgaaaataaaaaacaggtctctgcgatccctcacccgcagctgcctgtatcacaaaagcgaagatcagcttcggcgcacgctggaagacgcggaggctctcttcagtaaatactgcgcgctgactcttaaggactagtttcgcgccctttctcaaatttaagcgcgaaaactacgtcatctccagcggccacacccggcgccagcacctgttgtcagcgccattttttagggcggagtaacttgtatgtgttgggaattgtagttttcttaaaatgggaagtgacgtaacgtgggaaaacggaagtgacgatttgaggaagttgtgggttttttggctttcgtttctgggcgtaggttcgcgtgcggttttctgggtgttttttgtggactttaaccgttacgtcattttttagtcctatatatactcgctctgcacttggcccttttttacactgtgactgattgagctggtgccgtgtcgagtggtgtttttttaataggttttcttttttactggtaaggctgactgttatgactacgtccggcgttccatttggcatgacactacgaccaacacgatctcggttgtctcggcgcactccgtacagtagggatcgtctacctccttttgagacagaaacccgcgctaccatactggaggatcatccgctgctgcccgaatgtaacactttgacaatgcacaacgtgagttacgtgcgaggtcttccctgcagtgtgggatttacgctgattcaggaatgggttgttccctgggatatggttctaacgcgggaggagcttgtaatcctgaggaagtgtatgcacgtgtgcctgtgttgtgccaacattgatatcatgacgagcatgatgatccatggttacgagtcctgggctctccactgtcattgttccagtcccggttccctgcagtgtatagccggcgggcaggttttggccagctggtttaggatggtggtggatggcgccatgtttaatcagaggtttatatggtaccgggaggtggtgaattacaacatgccaaaagaggtaatgtttatgtccagcgtgtttatgaggggtcgccacttaatctacctgcgcttgtggtatgatggccacgtgggttctgtggtccccgccatgagctttggatacagcgccttgcactgtgggattttgaacaatattgtggtgctgtgctgcagttactgtgctgatttaagtgagatcagggtgcgctgctgtgcccggaggacaaggcgccttatgctgcgggcggtgcgaatcatcgctgaggagaccactgccatgttgtattcctgcaggacggagcggcggcggcagcagtttattcgcgcgctgctgcagcaccaccgccctatcctgatgcacgattatgactctacccccatgtaggcgtggacttctccttcgccgcccgttaagcaaccgcaagttggacagcagcctgtggctcagcagctggacagcgacatgaacttaagtgagctgcccggggagtttattaatatcactgatgagcgtttggctcgacaggaaaccgtgtggaatataacacctaagaatatgtctgttacccatgatatgatgctttttaaggccagccggggagaaaggactgtgtactctgtgtgttgggagggaggtggcaggttgaatactagggttctgtgagtttgattaaggtacggtgatctgtataagctatgtggtggtggggctatactactgaatgaaaaatgacttgaaattttctgcaattgaaaaataaacacgttgaaacataacacaaacgattctttattcttgggcaatgtatgaaaaagtgtaagaggatgtggcaaatatttcattaatgtagttgtggccagaccagtcccatgaaaatgacatagagtatgcacttggagttgtgtctcctgtttcctgtgtaccgtttagtgtaatggttagtgttacaggtttagttttgtctccgtttaagtaaacttgactgacaatgttacttttggcagttttaccgtgagattttggataagctgataggttaggcataaatccaacagcgtttgtataggctgtcgcccctcctgacgcggtaggaggaggggagggtgccctgcatgtctgccgctgctcttgctcttgccgctgctgaggaggggggcgcatctgccgcagcaccggatgcatctgggaaaagcaaaaaaggggctcgtccctgtttccggaggaatttgcaagcggggtcttgcatgacggggaggcaaacccccgttcgccgcagtccggccggtccgagactcgaaccgggggtcccgcgactcaacccttggaaaataaccctccggctacagggagcgagccacttaatgctttcgctttccagcctaaccgcttacgctgcgcgcggccagtggccaaaaaagctagcgcagcagccgccgcgcctggaaggaagccaaaaggagcactcccccgttgtctgacgtcgcacacctgggttcgacacgcgggcggtaaccgcatggatcacggcggacggccggatacggggctcgaaccccggtcgtccgccatgatacccttgcgaatttatccaccagaccacggaagagtgcccgcttacaggctctccttttgcacggtctagagcgtcaacgattgcgcgcgcctgaccggccagagcgtcccgaccatggagcactttttgccgctgcgcaacatctggaaccgcgtccgcgactttccgcgcgcctccaccaccgccgccggcatcacctggatgtccaggtacatctacggata

SEQ ID NO: 169 - DNA, 12579 bp, synthetic construct
  source 1..12579: mol_type = other DNA
tcgcgcgtttcggtgatgacggtgaaaacctctgacacatgcagctcccggagacggtcacagcttgtctgtaagcggatgccgggagcagacaagcccgtcagggcgcgtcagcgggtgttggcgggtgtcggggctggcttaactatgcggcatcagagcagattgtactgagagtgcaccatatgcggtgtgaaataccgcacagatgcgtaaggagaaaataccgcatcaggcgccattcgccattcaggctgcgcaactgttgggaagggcgatcggtgcgggcctcttcgctattacgccagctggcgaaagggggatgtgctgcaaggcgattaagttgggtaacgccagggttttcccagtcacgacgttgtaaaacgacggccagagaattccgcagggtctccattttgaagcgggaggtttgaacgcgcagccgccatgccggggttttacgagattgtgattaaggtccccagcgaccttgacgagcatctgcccggcatttctgacagctttgtgaactgggtggccgagaaggaatgggagttgccgccagattctgacatggatctgaatctgattgagcaggcacccctgaccgtggccgagaagctgcagcgcgactttctgacggaatggcgccgtgtgagtaaggccccggaggctcttttctttgtgcaatttgagaagggagagagctacttccacatgcacgtgctcgtggaaaccaccggggtgaaatccatggttttgggacgtttcctgagtcagattcgcgaaaaactgattcagagaatttaccgcgggatcgagccgactttgccaaactggttcgcggtcacaaagaccagaaatggcgccggaggcgggaacaaggtggtggatgagtgctacatccccaattacttgctccccaaaacccagcctgagctccagtgggcgtggactaatatggaacagtatttaagcgcctgtttgaatctcacggagcgtaaacggttggtggcgcagcatctgacgcacgtgtcgcagacgcaggagcagaacaaagagaatcagaatcccaattctgatgcgccggtgatcagatcaaaaacttcagccaggtacatggagctggtcgggtggctcgtggacaaggggattacctcggagaagcagtggatccaggaggaccaggcctcatacatctccttcaatgcggcctccaactcgcggtcccaaatcaaggctgccttggacaatgcgggaaagattatgagcctgactaaaaccgcccccgactacctggtgggccagcagcccgtggaggacatttccagcaatcggatttataaaattttggaactaaacgggtacgatccccaatatgcggcttccgtctttctgggatgggccacgaaaaagttcggcaagaggaacaccatctggctgtttgggcctgcaactaccgggaagaccaacatcgcggaggccatagcccacactgtgcccttctacgggtgcgtaaactggaccaatgagaactttcccttcaacgactgtgtcgacaagatggtgatctggtgggaggaggggaagatgaccgccaaggtcgtggagtcggccaaagccattctcggaggaagcaaggtgcgcgtggaccagaaatgcaagtcctcggcccagatagacccgactcccgtgatcgtcacctccaacaccaacatgtgcgccgtgattgacgggaactcaacgaccttcgaacaccagcagccgttgcaagaccggatgttcaaatttgaactcacccgccgtctggatcatgactttgggaaggtcaccaagcaggaagtcaaagactttttccggtgggcaaaggatcacgtggttgaggtggagcatgaattctacgtcaaaaagggtggagccaagaaaagacccgcccccagtgacgcagatataagtgagcccaaacgggtgcgcgagtcagttgcgcagccatcgacgtcagacgcggaagcttcgatcaactacgcagacaggtaccaaaacaaatgttctcgtcacgtgggcatgaatctgatgctgtttccctgcagacaatgcgagagaatgaatcagaattcaaatatctgcttcactcacggacagaaagactgtttagagtgctttcccgtgtcagaatctcaacccgtttctgtcgtcaaaaaggcgtatcagaaactgtgctacattcatcatatcatgggaaaggtgccagacgcttgcactgcctgcgatctggtcaatgtggatttggatgactgcatctttgaacaataaatgatttaaatcaggtatggctgccgatggttatcttccagattggctcgaggacactctctctgaaggaataagacagtggtggaagctcaaacctggcccaccaccaccaaagcccgcagagcggcataaggacgacagcaggggtcttgtgcttcctgggtacaagtacctcggacccttcaacggactcgacaagggagagccggtgaacgaggcagacgccgcggccctcgagcacgacaaagcctacgaccggcagctcgacagcggagacaacccgtacctcaagtacaaccacgccgacgcggagtttcaggagcgccttaaagaagatacgtcttttgggggcaacctcggacgagcagtcttccaggcgaaaaagagggttcttgaacctctgggcctggttgaggaacctgttaagacggctccgggaaaaaagaggccggtagagcactctcctgtggagccagactcctcctcgggaaccggaaaggcgggccagcagcctgcaagaaaaagattgaattttggtcagactggagacgcagactcagtacctgacccccagcctctcggacagccaccagcagccccctctggtctgggaactaatacgatggctacaggcagtggcgcaccaatggcagacaataacgagggcgccgacggagtgggtaattcctcgggaaattggcattgcgattccacatggatgggcgacagagtcatcaccaccagcacccgaacctgggccctgcccacctacaacaaccacctctacaaacaaatttccagccaatcaggagcctcgaacgacaatcactactttggctacagcaccccttgggggtattttgacttcaacagattccactgccacttttcaccacgtgactggcaaagactcatcaacaacaactggggattccgacccaagagactcaacttcaagctctttaacattcaagtcaaagaggtcacgcagaatgacggtacgacgacgattgccaataaccttaccagcacggttcaggtgtttactgactcggagtaccagctcccgtacgtcctcggctcggcgcatcaaggatgcctcccgccgttcccagcagacgtcttcatggtgccacagtatggatacctcaccctgaacaacgggagtcaggcagtaggacgctcttcattttactgcctggagtactttccttctcagatgctgcgtaccggaaacaactttaccttcagctacacttttgaggacgttcctttccacagcagctacgctcacagccagagtctggaccgtctcatgaatcctctcatcgaccagtacctgtattacttgagcagaacaaacactccaagtggaaccaccacgcagtcaaggcttcagttttctcaggccggagcgagtgacattcgggaccagtctaggaactggcttcctggaccctgttaccgccagcagcgagtatcaaagacatctgcggataacaacaacagtgaatactcgtggactggagctaccaagtaccacctcaatggcagagactctctggtgaatccgggcccggccatggcaagccacaaggacgatgaagaaaagttttttcctcagagcggggttctcatctttgggaagcaaggctcagagaaaacaaatgtggacattgaaaaggtcatgattacagacgaagaggaaatcaggacaaccaatcccgtggctacggagcagtatggttctgtatctaccaacctccagagaggcaacagacaagcagctaccgcagatgtcaacacacaaggcgttcttccaggcatggtctggcaggacagagatgtgtaccttcaggggcccatctgggcaaagattccacacacggacggacattttcacccctctcccctcatgggtggattcggacttaaacaccctcctccacagattctcatcaagaacaccccggtacctgcgaatccttcgaccaccttcagtgcggcaaagtttgcttccttcatcacacagtactccacgggacaggtcagcgtggagatcgagtgggagctgcagaaggaaaacagcaaacgctggaatcccgaaattcagtacacttccaactacaacaagtctgttaatgtggactttactgtggacactaatggcgtgtattcagagcctcgccccattggcaccagatacctgactcgtaatctgtaattgcctgttaatcaataaaccggttgattcgtttcagttgaactttggtctctgcgaagggcgaattcgtttaaacctgcaggactagagccgaattctgcatcgcgatagggataacagggtaataaataatgtactagagacactttcaataaaggcaaatgcttttatttgtacactctcgggtgattatttacccccacccttgccgtctgcgccgtttaaaaatcaaaggggttctgccgcgcatcgctatgcgccactggcagggacacgttgcgatactggtgtttagtgctccacttaaactcaggcacaaccatccgcggcagctcggtgaagttttcactccacaggctgcgcaccatcaccaacgcgtttagcaggtcgggcgccgatatcttgaagtcgcagttggggcctccgccctgcgcgcgcgagttgcgatacacagggttgcagcactggaacactatcagcgccgggtggtgcacgctggccagcacgctcttgtcggagatcagatccgcgtccaggtcctccgcgttgctcagggcgaacggagtcaactttggtagctgccttcccaaaaagggcgcgtgcccaggctttgagttgcactcgcaccgtagtggcatcaaaaggtgaccgtgcccggtctgggcgttaggatacagcgcctgcataaaagccttgatctgcttaaaagccacctgagcctttgcgccttcagagaagaacatgccgcaagacttgccggaaaactgattggccggacaggccgcgtcgtgcacgcagcaccttgcgtcggtgttggagatctgcaccacatttcggccccaccggttcttcacgatcttggccttgctagactgctccttcagcgcgcgctgcccgttttcgctcgtcacatccatttcaatcacgtgctccttatttatcataatgcttccgtgtagacacttaagctcgccttcgatctcagcgcagcggtgcagccacaacgcgcagcccgtgggctcgtgatgcttgtaggtcacctctgcaaacgactgcaggtacgcctgcaggaatcgccccatcatcgtcacaaaggtcttgttgctggtgaaggtcagctgcaacccgcggtgctcctcgttcagccaggtcttgcatacggccgccagagcttccacttggtcaggcagtagtttgaagttcgcctttagatcgttatccacgtggtacttgtccatcagcgcgcgcgcagcctccatgcccttctcccacgcagacacgatcggcacactcagcgggttcatcaccgtaatttcactttccgcttcgctgggctcttcctcttcctcttgcgtccgcataccacgcgccactgggtcgtcttcattcagccgccgcactgtgcgcttacctcctttgccatgcttgattagcaccggtgggttgctgaaacccaccatttgtagcgccacatcttctctttcttcctcgctgtccacgattacctctggtgatggcgggcgctcgggcttgggagaagggcgcttctttttcttcttgggcgcaatggccaaatccgccgccgaggtcgatggccgcgggctgggtgtgcgcggcaccagcgcgtcttgtgatgagtcttcctcgtcctcggactcgatacgccgcctcatccgcttttttgggggcgcccggggaggcggcggcgacggggacggggacgacacgtcctccatggttgggggacgtcgcgccgcaccgcgtccgcgctcgggggtggtttcgcgctgctcctcttcccgactggccatttccttctcctataggcagaaaaagatcgttgaaactcactccggggctgtggacgtcggcttaccttcgcaaatttgtacctgaggactaccacgcccacgagattaggttctacgaagaccaatcccgcccgcctaatgcggagcttaccgcctgcgtcattacccagggccacattcttggccaattgcaagccatcaacaaagcccgccaagagtttctgctacgaaagggacggggggtttacttggacccccagtccggcgaggagctcaacccaatccccccgccgccgcagccctatcagcagcagccgcgggcccttgcttcccaggatggcacccaaaaagaagctgcagctgccgccgccacccacggacgaggaggaatactgggacagtcaggcagaggaggttttggacgaggaggaggaggacatgatggaagactgggagagcctagacgaggaagcttccgaggtcgaagaggtgtcagacgaaacaccgtcaccctcggtcgcattcccctcgccggcgccccagaaatcggcaaccggttccagcatggctacaacctccgctcctcaggcgccgccggcactgcccgttcgccgacccaaccgtagatgggacaccactggaaccagggccggtaagtccaagcagccgccgccgttagcccaagagcaacaacagcgccaaggctaccgctcatggcgcgggcacaagaacgccatagttgcttgcttgcaagactgtgggggcaacatctccttcgcccgccgctttcttctctaccatcacggcgtggccttcccccgtaacatcctgcattactaccgtcatctctacagcccatactgcaccggcggcagcggcagcaacagcagcggccacacagaagcaaaggcgaccggatagcaagactctgacaaagcccaagaaatccacagcggcggcagcagcaggaggaggagcgctgcgtctggcgcccaacgaacccgtatcgacccgcgagcttagaaacaggatttttcccactctgtatgctatatttcaacagagcaggggccaagaacaagagctgaaaataaaaaacaggtctctgcgatccctcacccgcagctgcctgtatcacaaaagcgaagatcagcttcggcgcacgctggaagacgcggaggctctcttcagtaaatactgcgcgctgactcttaaggactagtttcgcgccctttctcaaatttaagcgcgaaaactacgtcatctccagcggccacacccggcgccagcacctgttgtcagcgccattttttagggcggagtaacttgtatgtgttgggaattgtagttttcttaaaatgggaagtgacgtaacgtgggaaaacggaagtgacgatttgaggaagttgtgggttttttggctttcgtttctgggcgtaggttcgcgtgcggttttctgggtgttttttgtggactttaaccgttacgtcattttttagtcctatatatactcgctctgcacttggcccttttttacactgtgactgattgagctggtgccgtgtcgagtggtgtttttttaataggttttcttttttactggtaaggctgactgttatgactacgtccggcgttccatttggcatgacactacgaccaacacgatctcggttgtctcggcgcactccgtacagtagggatcgtctacctccttttgagacagaaacccgcgctaccatactggaggatcatccgctgctgcccgaatgtaacactttgacaatgcacaacgtgagttacgtgcgaggtcttccctgcagtgtgggatttacgctgattcaggaatgggttgttccctgggatatggttctaacgcgggaggagcttgtaatcctgaggaagtgtatgcacgtgtgcctgtgttgtgccaacattgatatcatgacgagcatgatgatccatggttacgagtcctgggctctccactgtcattgttccagtcccggttccctgcagtgtatagccggcgggcaggttttggccagctggtttaggatggtggtggatggcgccatgtttaatcagaggtttatatggtaccgggaggtggtgaattacaacatgccaaaagaggtaatgtttatgtccagcgtgtttatgaggggtcgccacttaatctacctgcgcttgtggtatgatggccacgtgggttctgtggtccccgccatgagctttggatacagcgccttgcactgtgggattttgaacaatattgtggtgctgtgctgcagttactgtgctgatttaagtgagatcagggtgcgctgctgtgcccggaggacaaggcgccttatgctgcgggcggtgcgaatcatcgctgaggagaccactgccatgttgtattcctgcaggacggagcggcggcggcagcagtttattcgcgcgctgctgcagcaccaccgccctatcctgatgcacgattatgactctacccccatgtaggcgtggacttctccttcgccgcccgttaagcaaccgcaagttggacagcagcctgtggctcagcagctggacagcgacatgaacttaagtgagctgcccggggagtttattaatatcactgatgagcgtttggctcgacaggaaaccgtgtggaatataacacctaagaatatgtctgttacccatgatatgatgctttttaaggccagccggggagaaaggactgtgtactctgtgtgttgggagggaggtggcaggttgaatactagggttctgtgagtttgattaaggtacggtgatctgtataagctatgtggtggtggggctatactactgaatgaaaaatgacttgaaattttctgcaattgaaaaataaacacgttgaaacataacacaaacgattctttattcttgggcaatgtatgaaaaagtgtaagaggatgtggcaaatatttcattaatgtagttgtggccagaccagtcccatgaaaatgacatagagtatgcacttggagttgtgtctcctgtttcctgtgtaccgtttagtgtaatggttagtgttacaggtttagttttgtctccgtttaagtaaacttgactgacaatgttacttttggcagttttaccgtgagattttggataagctgataggttaggcataaatccaacagcgtttgtataggctgtcgcccctcctgacgcggtaggaggaggggagggtgccctgcatgtctgccgctgctcttgctcttgccgctgctgaggaggggggcgcatctgccgcagcaccggatgcatctgggaaaagcaaaaaaggggctcgtccctgtttccggaggaatttgcaagcggggtcttgcatgacggggaggcaaacccccgttcgccgcagtccggccggtccgagactcgaaccgggggtcccgcgactcaacccttggaaaataaccctccggctacagggagcgagccacttaatgctttcgctttccagcctaaccgcttacgctgcgcgcggccagtggccaaaaaagctagcgcagcagccgccgcgcctggaaggaagccaaaaggagcactcccccgttgtctgacgtcgcacacctgggttcgacacgcgggcggtaaccgcatggatcacggcggacggccggatacggggctcgaaccccggtcgtccgccatgatacccttgcgaatttatccaccagaccacggaagagtgcccgcttacaggctctccttttgcacggtctagagcgtcaacgattgcgcgcgcctgaccggccagagcgtcccgaccatggagcactttttgccgctgcgcaacatctggaaccgcgtccgcgactttccgcgcgcctccaccaccgccgccggcatcacctggatgtccaggtacatctacggatatggcaaacagctattatgggtattatgggtgcggccgcggatcccgggcccgtcgactgcagaggcctgcatgcaagcttggtgtaatcatggtcatagctgtttcctgtgtgaaattgttatccgctcacaattccacacaacatacgagccggaagcataaagtgtaaagcctggggtgcctaatgagtgagctaactcacattaattgcgttgcgctcactgcccgctttccagtcgggaaacctgtcgtgccagctgcattaatgaatcggccaacgcgcggggagaggcggtttgcgtattgggcgctcttccgcttcctcgctcactgactcgctgcgctcggtcgttcggctgcggcgagcggtatcagctcactcaaaggcggtaatacggttatccacagaatcaggggataacgcaggaaagaacatgtgagcaaaaggccagcaaaaggccaggaaccgtaaaaaggccgcgttgctggcgtttttccataggctccgcccccctgacgagcatcacaaaaatcgacgctcaagtcagaggtggcgaaacccgacaggactataaagataccaggcgtttccccctggaagctccctcgtgcgctctcctgttccgaccctgccgcttaccggatacctgtccgcctttctcccttcgggaagcgtggcgctttctcatagctcacgctgtaggtatctcagttcggtgtaggtcgttcgctccaagctgggctgtgtgcacgaaccccccgttcagcccgaccgctgcgccttatccggtaactatcgtcttgagtccaacccggtaagacacgacttatcgccactggcagcagccactggtaacaggattagcagagcgaggtatgtaggcggtgctacagagttcttgaagtggtggcctaactacggctacactagaagaacagtatttggtatctgcgctctgctgaagccagttaccttcggaaaaagagttggtagctcttgatccggcaaacaaaccaccgctggtagcggtggtttttttgtttgcaagcagcagattacgcgcagaaaaaaaggatctcaagaagatcctttgatcttttctacggggtctgacgctcagtggaacgaaaactcacgttaagggattttggtcatgagattatcaaaaaggatcttcacctagaaggtcctgtattagaggtcacgtgagtgttttgcgacattttgcgacaccatgtggtcacgctgggtatttaagcccgagtgagcacgcagggtctccattttgaagcgggaggtttgaacgcgcagccgccatccttttaaattaaaaatgaagttttaaatcaagcccaatctgaataatgttacaaccaattaaccaattctgattagaaaaactcatcgagcatcaaatgaaactgcaatttattcatatcaggattatcaataccatatttttgaaaaagccgtttctgtaatgaaggagaaaactcaccgaggcagttccataggatggcaagatcctggtatcggtctgcgattccgactcgtccaacatcaatacaacctattaatttcccctcgtcaaaaataaggttatcaagtgagaaatcaccatgagtgacgactgaatccggtgagaatggcaaaagtttatgcatttctttccagacttgttcaacaggccagccattacgctcgtcatcaaaatcactcgcatcaaccaaaccgttattcattcgtgattgcgcctgagcgagacgaaatacgcgatcgctgttaaaaggacaattacaaacaggaatcgaatgcaaccggcgcaggaacactgccagcgcatcaacaatattttcacctgaatcaggatattcttctaatacctggaatgctgtttttccggggatcgcagtggtgagtaaccatgcatcatcaggagtacggataaaatgcttgatggtcggaagaggcataaattccgtcagccagtttagtctgaccatctcatctgtaacatcattggcaacgctacctttgccatgtttcagaaacaactctggcgcatcgggcttcccatacaagcgatagattgtcgcacctgattgcccgacattatcgcgagcccatttatacccatataaatcagcatccatgttggaatttaatcgcggcctcgacgtttcccgttgaatatggctcataacaccccttgtattactgtttatgtaagcagacagttttattgttcatgatgatatatttttatcttgtgcaatgtaacatcagagattttgagacacgggccagagctgca

SEQ ID NO: 170 - DNA, 5505 bp, synthetic construct; identical to SEQ ID NO: 25
  source 1..5505: mol_type = other DNA

SEQ ID NO: 171 - DNA, 2208 bp, synthetic construct
  source 1..2208: mol_type = other DNA
atggctgccgatggttatcttccagattggctcgaggacactctctctgaaggaataagacagtggtggaagctcaaacctggcccaccaccaccaaagcccgcagagcggcataaggacgacagcaggggtcttgtgcttcctgggtacaagtacctcggacccttcaacggactcgacaagggagagccggtcaacgaggcagacgccgcggccctcgagcacgacaaagcctacgaccggcagctcgacagcggagacaacccgtacctcaagtacaaccacgccgacgcggagtttcaggagcgcctgaaagaagatacgtcttttgggggcaacctcggacgagcagtcttccaggcgaaaaagagggttcttgaacctctgggcctggttgaggaacctgttaagacggctccgggaaaaaagaggccggtagagcactctcctgtggagccagactcctcctcgggaaccggaaaggcgggccagcagcctgcaagaaaaagattgaattttggtcagactggagacgcagactcagtacctgacccccagcctctcggacagccaccagcagccccctctggtctgggaactaatacgatggctacaggcagtggcgcaccaatggcagacaataacgagggcgccgacggagtgggtaattcctcgggaaattggcattgcgattccacatggatgggcgacagagtcatcaccaccagcacccgaacctgggccctgcccacctacaacaaccacctctacaaacaaatttccagccaatcaggagcctcgaacgacaatcactactttggctacagcaccccttgggggtattttgacttcaacagattccactgccacttttcaccacgtgactggcaaagactcatcaacaacaactggggattccgacccaagagactcaacttcaagctctttaacattcaagtcaaagaggtcacgcagaatgacggtacgacgacgattgccaataaccttaccagcacggttcaggtgtttactgactcggagtaccagctcccgtacgtcctcggctcggcgcatcaaggatgcctcccgccgttcccagcagacgtcttcatggtgccacagtatggatacctcaccctgaacaacgggagtcaggcagtaggacgctcttcattttactgcctggagtactttccttctcagatgctgcgtaccggaaacaactttaccttcagctacacttttgaggacgttcctttccacagcagctacgctcacagccagagtctggaccgtctcatgaatcctctcatcgaccagtacctgtattacttgagcagaacaaacactccaagtggaaccaccacgcagtcaaggcttcagttttctcaggccggagcgagtgacattcgggaccagtctaggaactggcttcctggaccctgttaccgccagcagcgagtatcaaagacatctgcggataacaacaacagtgaatactcgtggactggagctaccaagtaccacctcaatggcagagactctctggtgaatccgggcccggccatggcaagccacaaggacgatgaagaaaagttttttcctcagagcggggttctcatctttgggaagcaaggctcagagaaaacaaatgtggacattgaaaaggtcatgattacagacgaagaggaaatcaggacaaccaatcccgtggctacggagcagtatggttctgtatctaccaacctccagagaggcaacagacaagcagctaccgcagatgtcaacacacaaggcgttcttccaggcatggtctggcaggacagagatgtgtaccttcaggggcccatctgggcaaagattccacacacggacggacattttcacccctctcccctcatgggtggattcggacttaaacaccctcctccacagattctcatcaagaacaccccggtacctgcgaatccttcgaccaccttcagtgcggcaaagtttgcttccttcatcacacagtactccacgggacaggtcagcgtggagatcgagtgggagctgcagaaggaaaacagcaaacgctggaatcccgaaattcagtacacttccaactacaacaagtctgttaatgtggactttactgtggacactaatggcgtgtattcagagcctcgccccattggcaccagatacctgactcgtaatctgtaa

SEQ ID NO: 172 - DNA, 4090 bp, synthetic construct
  source 1..4090: mol_type = other DNA
atgccggggttttacgagattgtgattaaggtccccagcgaccttgacgagcatctgcccggcatttctgacagctttgtgaactgggtggccgagaaggaatgggagttgccgccagattctgacatggatctgaatctgattgagcaggcacccctgaccgtggccgagaagctgcagcgcgactttctgacggaatggcgccgtgtgagtaaggccccggaggctcttttctttgtgcaatttgagaagggagagagctacttccacatgcacgtgctcgtggaaaccaccggggtgaaatccatggttttgggacgtttcctgagtcagattcgcgaaaaactgattcagagaatttaccgcgggatcgagccgactttgccaaactggttcgcggtcacaaagaccagaaatggcgccggaggcgggaacaaggtggtggatgagtgctacatccccaattacttgctccccaaaacccagcctgagctccagtgggcgtggactaatatggaacagtatttaagcgcctgtttgaatctcacggagcgtaaacggttggtggcgcagcatctgacgcacgtgtcgcagacgcaggagcagaacaaagagaatcagaatcccaattctgatgcgccggtgatcagatcaaaaacttcagccaggtacatggagctggtcgggtggctcgtggacaaggggattacctcggagaagcagtggatccaggaggaccaggcctcatacatctccttcaatgcggcctccaactcgcggtcccaaatcaaggctgccttggacaatgcgggaaagattatgagcctgactaaaaccgcccccgactacctggtgggccagcagcccgtggaggacatttccagcaatcggatttataaaattttggaactaaacgggtacgatccccaatatgcggcttccgtctttctgggatgggccacgaaaaagttcggcaagaggaacaccatctggctgtttgggcctgcaactaccgggaagaccaacatcgcggaggccatagcccacactgtgcccttctacgggtgcgtaaactggaccaatgagaactttcccttcaacgactgtgtcgacaagatggtgatctggtgggaggaggggaagatgaccgccaaggtcgtggagtcggccaaagccattctcggaggaagcaaggtgcgcgtggaccagaaatgcaagtcctcggcccagatagacccgactcccgtgatcgtcacctccaacaccaacatgtgcgccgtgattgacgggaactcaacgaccttcgaacaccagcagccgttgcaagaccggatgttcaaatttgaactcacccgccgtctggatcatgactttgggaaggtcaccaagcaggaagtcaaagactttttccggtgggcaaaggatcacgtggttgaggtggagcatgaattctacgtcaaaaagggtggagccaagaaaagacccgcccccagtgacgcagatataagtgagcccaaacgggtgcgcgagtcagttgcgcagccatcgacgtcagacgcggaagcttcgatcaactacgcagacaggtaccaaaacaaatgttctcgtcacgtgggcatgaatctgatgctgtttccctgcagacaatgcgagagaatgaatcagaattcaaatatctgcttcactcacggacagaaagactgtttagagtgctttcccgtgtcagaatctcaacccgtttctgtcgtcaaaaaggcgtatcagaaactgtgctacattcatcatatcatgggaaaggtgccagacgcttgcactgcctgcgatctggtcaatgtggatttggatgactgcatctttgaacaataaatgatttaaatcaggtatggctgccgatggttatcttccagattggctcgaggacactctctctgaaggaataagacagtggtggaagctcaaacctggcccaccaccaccaaagcccgcagagcggcataaggacgacagcaggggtcttgtgcttcctgggtacaagtacctcggacccttcaacggactcgacaagggagagccggtcaacgaggcagacgccgcggccctcgagcacgacaaagcctacgaccggcagctcgacagcggagacaacccgtacctcaagtacaaccacgccgacgcggagtttcaggagcgcctgaaagaagatacgtcttttgggggcaacctcggacgagcagtcttccaggcgaaaaagagggttcttgaacctctgggcctggttgaggaacctgttaagacggctccgggaaaaaagaggccggtagagcactctcctgtggagccagactcctcctcgggaaccggaaaggcgggccagcagcctgcaagaaaaagattgaattttggtcagactggagacgcagactcagtacctgacccccagcctctcggacagccaccagcagccccctctggtctgggaactaatacgatggctacaggcagtggcgcaccaatggcagacaataacgagggcgccgacggagtgggtaattcctcgggaaattggcattgcgattccacatggatgggcgacagagtcatcaccaccagcacccgaacctgggccctgcccacctacaacaaccacctctacaaacaaatttccagccaatcaggagcctcgaacgacaatcactactttggctacagcaccccttgggggtattttgacttcaacagattccactgccacttttcaccacgtgactggcaaagactcatcaacaacaactggggattccgacccaagagactcaacttcaagctctttaacattcaagtcaaagaggtcacgcagaatgacggtacgacgacgattgccaataaccttaccagcacggttcaggtgtttactgactcggagtaccagctcccgtacgtcctcggctcggcgcatcaaggatgcctcccgccgttcccagcagacgtcttcatggtgccacagtatggatacctcaccctgaacaacgggagtcaggcagtaggacgctcttcattttactgcctggagtactttccttctcagatgctgcgtaccggaaacaactttaccttcagctacacttttgaggacgttcctttccacagcagctacgctcacagccagagtctggaccgtctcatgaatcctctcatcgaccagtacctgtattacttgagcagaacaaacactccaagtggaaccaccacgcagtcaaggcttcagttttctcaggccggagcgagtgacattcgggaccagtctaggaactggcttcctggaccctgttaccgccagcagcgagtatcaaagacatctgcggataacaacaacagtgaatactcgtggactggagctaccaagtaccacctcaatggcagagactctctggtgaatccgggcccggccatggcaagccacaaggacgatgaagaaaagttttttcctcagagcggggttctcatctttgggaagcaaggctcagagaaaacaaatgtggacattgaaaaggtcatgattacagacgaagaggaaatcaggacaaccaatcccgtggctacggagcagtatggttctgtatctaccaacctccagagaggcaacagacaagcagctaccgcagatgtcaacacacaaggcgttcttccaggcatggtctggcaggacagagatgtgtaccttcaggggcccatctgggcaaagattccacacacggacggacattttcacccctctcccctcatgggtggattcggacttaaacaccctcctccacagattctcatcaagaacaccccggtacctgcgaatccttcgaccaccttcagtgcggcaaagtttgcttccttcatcacacagtactccacgggacaggtcagcgtggagatcgagtgggagctgcagaaggaaaacagcaaacgctggaatcccgaaattcagtacacttccaactacaacaagtctgttaatgtggactttactgtggacactaatggcgtgtattcagagcctcgccccattggcaccagatacctgactcgtaatctgtaa

SEQ ID NO: 173 - DNA, 9816 bp, synthetic construct
  source 1..9816: mol_type = other DNA
atgccggggttttacgagattgtgattaaggtccccagcgaccttgacgagcatctgcccggcatttctgacagctttgtgaactgggtggccgagaaggaatgggagttgccgccagattctgacatggatctgaatctgattgagcaggcacccctgaccgtggccgagaagctgcagcgcgactttctgacggaatggcgccgtgtgagtaaggccccggaggctcttttctttgtgcaatttgagaagggagagagctacttccacatgcacgtgctcgtggaaaccaccggggtgaaatccatggttttgggacgtttcctgagtcagattcgcgaaaaactgattcagagaatttaccgcgggatcgagccgactttgccaaactggttcgcggtcacaaagaccagaaatggcgccggaggcgggaacaaggtggtggatgagtgctacatccccaattacttgctccccaaaacccagcctgagctccagtgggcgtggactaatatggaacagtatttaagcgcctgtttgaatctcacggagcgtaaacggttggtggcgcagcatctgacgcacgtgtcgcagacgcaggagcagaacaaagagaatcagaatcccaattctgatgcgccggtgatcagatcaaaaacttcagccaggtacatggagctggtcgggtggctcgtggacaaggggattacctcggagaagcagtggatccaggaggaccaggcctcatacatctccttcaatgcggcctccaactcgcggtcccaaatcaaggctgccttggacaatgcgggaaagattatgagcctgactaaaaccgcccccgactacctggtgggccagcagcccgtggaggacatttccagcaatcggatttataaaattttggaactaaacgggtacgatccccaatatgcggcttccgtctttctgggatgggccacgaaaaagttcggcaagaggaacaccatctggctgtttgggcctgcaactaccgggaagaccaacatcgcggaggccatagcccacactgtgcccttctacgggtgcgtaaactggaccaatgagaactttcccttcaacgactgtgtcgacaagatggtgatctggtgggaggaggggaagatgaccgccaaggtcgtggagtcggccaaagccattctcggaggaagcaaggtgcgcgtggaccagaaatgcaagtcctcggcccagatagacccgactcccgtgatcgtcacctccaacaccaacatgtgcgccgtgattgacgggaactcaacgaccttcgaacaccagcagccgttgcaagaccggatgttcaaatttgaactcacccgccgtctggatcatgactttgggaaggtcaccaagcaggaagtcaaagactttttccggtgggcaaaggatcacgtggttgaggtggagcatgaattctacgtcaaaaagggtggagccaagaaaagacccgcccccagtgacgcagatataagtgagcccaaacgggtgcgcgagtcagttgcgcagccatcgacgtcagacgcggaagcttcgatcaactacgcagacaggtaccaaaacaaatgttctcgtcacgtgggcatgaatctgatgctgtttccctgcagacaatgcgagagaatgaatcagaattcaaatatctgcttcactcacggacagaaagactgtttagagtgctttcccgtgtcagaatctcaacccgtttctgtcgtcaaaaaggcgtatcagaaactgtgctacattcatcatatcatgggaaaggtgccagacgcttgcactgcctgcgatctggtcaatgtggatttggatgactgcatctttgaacaataaatgatttaaatcaggtatggctgccgatggttatcttccagattggctcgaggacactctctctgaaggaataagacagtggtggaagctcaaacctggcccaccaccaccaaagcccgcagagcggcataaggacgacagcaggggtcttgtgcttcctgggtacaagtacctcggacccttcaacggactcgacaagggagagccggtcaacgaggcagacgccgcggccctcgagcacgacaaagcctacgaccggcagctcgacagcggagacaacccgtacctcaagtacaaccacgccgacgcggagtttcaggagcgcctgaaagaagatacgtcttttgggggcaacctcggacgagcagtcttccaggcgaaaaagagggttcttgaacctctgggcctggttgaggaacctgttaagacggctccgggaaaaaagaggccggtagagcactctcctgtggagccagactcctcctcgggaaccggaaaggcgggccagcagcctgcaagaaaaagattgaattttggtcagactggagacgcagactcagtacctgacccccagcctctcggacagccaccagcagccccctctggtctgggaactaatacgatggctacaggcagtggcgcaccaatggcagacaataacgagggcgccgacggagtgggtaattcctcgggaaattggcattgcgattccacatggatgggcgacagagtcatcaccaccagcacccgaacctgggccctgcccacctacaacaaccacctctacaaacaaatttccagccaatcaggagcctcgaacgacaatcactactttggctacagcaccccttgggggtattttgacttcaacagattccactgccacttttcaccacgtgactggcaaagactcatcaacaacaactggggattccgacccaagagactcaacttcaagctctttaacattcaagtcaaagaggtcacgcagaatgacggtacgacgacgattgccaataaccttaccagcacggttcaggtgtttactgactcggagtaccagctcccgtacgtcctcggctcggcgcatcaaggatgcctcccgccgttcccagcagacgtcttcatggtgccacagtatggatacctcaccctgaacaacgggagtcaggcagtaggacgctcttcattttactgcctggagtactttccttctcagatgctgcgtaccggaaacaactttaccttcagctacacttttgaggacgttcctttccacagcagctacgctcacagccagagtctggaccgtctcatgaatcctctcatcgaccagtacctgtattacttgagcagaacaaacactccaagtggaaccaccacgcagtcaaggcttcagttttctcaggccggagcgagtgacattcgggaccagtctaggaactggcttcctggaccctgttaccgccagcagcgagtatcaaagacatctgcggataacaacaacagtgaatactcgtggactggagctaccaagtaccacctcaatggcagagactctctggtgaatccgggcccggccatggcaagccacaaggacgatgaagaaaagttttttcctcagagcggggttctcatctttgggaagcaaggctcagagaaaacaaatgtggacattgaaaaggtcatgattacagacgaagaggaaatcaggacaaccaatcccgtggctacggagcagtatggttctgtatctaccaacctccagagaggcaacagacaagcagctaccgcagatgtcaacacacaaggcgttcttccaggcatggtctggcaggacagagatgtgtaccttcaggggcccatctgggcaaagattccacacacggacggacattttcacccctctcccctcatgggtggattcggacttaaacaccctcctccacagattctcatcaagaacaccccggtacctgcgaatccttcgaccaccttcagtgcggcaaagtttgcttccttcatcacacagtactccacgggacaggtcagcgtggagatcgagtgggagctgcagaaggaaaacagcaaacgctggaatcccgaaattcagtacacttccaactacaacaagtctgttaatgtggactttactgtggacactaatggcgtgtattcagagcctcgccccattggcaccagatacctgactcgtaatctgtaattgcctgttaatcaataaaccggttgattcgtttcagttgaactttggtctctgcgaagggcgaattcgtttaaacctgcaggactagagccgaattctgcatcgcgatagggataacagggtaataaataatgtactagagacactttcaataaaggcaaatgcttttatttgtacactctcgggtgattatttacccccacccttgccgtctgcgccgtttaaaaatcaaaggggttctgccgcgcatcgctatgcgccactggcagggacacgttgcgatactggtgtttagtgctccacttaaactcaggcacaaccatccgcggcagctcggtgaagttttcactccacaggctgcgcaccatcaccaacgcgtttagcaggtcgggcgccgatatcttgaagtcgcagttggggcctccgccctgcgcgcgcgagttgcgatacacagggttgcagcactggaacactatcagcgccgggtggtgcacgctggccagcacgctcttgtcggagatcagatccgcgtccaggtcctccgcgttgctcagggcgaacggagtcaactttggtagctgccttcccaaaaagggcgcgtgcccaggctttgagttgcactcgcaccgtagtggcatcaaaaggtgaccgtgcccggtctgggcgttaggatacagcgcctgcataaaagccttgatctgcttaaaagccacctgagcctttgcgccttcagagaagaacatgccgcaagacttgccggaaaactgattggccggacaggccgcgtcgtgcacgcagcaccttgcgtcggtgttggagatctgcaccacatttcggccccaccggttcttcacgatcttggccttgctagactgctccttcagcgcgcgctgcccgttttcgctcgtcacatccatttcaatcacgtgctccttatttatcataatgcttccgtgtagacacttaagctcgccttcgatctcagcgcagcggtgcagccacaacgcgcagcccgtgggctcgtgatgcttgtaggtcacctctgcaaacgactgcaggtacgcctgcaggaatcgccccatcatcgtcacaaaggtcttgttgctggtgaaggtcagctgcaacccgcggtgctcctcgttcagccaggtcttgcatacggccgccagagcttccacttggtcaggcagtagtttgaagttcgcctttagatcgttatccacgtggtacttgtccatcagcgcgcgcgcagcctccatgcccttctcccacgcagacacgatcggcacactcagcgggttcatcaccgtaatttcactttccgcttcgctgggctcttcctcttcctcttgcgtccgcataccacgcgccactgggtcgtcttcattcagccgccgcactgtgcgcttacctcctttgccatgcttgattagcaccggtgggttgctgaaacccaccatttgtagcgccacatcttctctttcttcctcgctgtccacgattacctctggtgatggcgggcgctcgggcttgggagaagggcgcttctttttcttcttgggcgcaatggccaaatccgccgccgaggtcgatggccgcgggctgggtgtgcgcggcaccagcgcgtcttgtgatgagtcttcctcgtcctcggactcgatacgccgcctcatccgcttttttgggggcgcccggggaggcggcggcgacggggacggggacgacacgtcctccatggttgggggacgtcgcgccgcaccgcgtccgcgctcgggggtggtttcgcgctgctcctcttcccgactggccatttccttctcctataggcagaaaaagatcgttgaaactcactccggggctgtggacgtcggcttaccttcgcaaatttgtacctgaggactaccacgcccacgagattaggttctacgaagaccaatcccgcccgcctaatgcggagcttaccgcctgcgtcattacccagggccacattcttggccaattgcaagccatcaacaaagcccgccaagagtttctgctacgaaagggacggggggtttacttggacccccagtccggcgaggagctcaacccaatccccccgccgccgcagccctatcagcagcagccgcgggcccttgcttcccaggatggcacccaaaaagaagctgcagctgccgccgccacccacggacgaggaggaatactgggacagtcaggcagaggaggttttggacgaggaggaggaggacatgatggaagactgggagagcctagacgaggaagcttccgaggtcgaagaggtgtcagacgaaacaccgtcaccctcggtcgcattcccctcgccggcgccccagaaatcggcaaccggttccagcatggctacaacctccgctcctcaggcgccgccggcactgcccgttcgccgacccaaccgtagatgggacaccactggaaccagggccggtaagtccaagcagccgccgccgttagcccaagagcaacaacagcgccaaggctaccgctcatggcgcgggcacaagaacgccatagttgcttgcttgcaagactgtgggggcaacatctccttcgcccgccgctttcttctctaccatcacggcgtggccttcccccgtaacatcctgcattactaccgtcatctctacagcccatactgcaccggcggcagcggcagcaacagcagcggccacacagaagcaaaggcgaccggatagcaagactctgacaaagcccaagaaatccacagcggcggcagcagcaggaggaggagcgctgcgtctggcgcccaacgaacccgtatcgacccgcgagcttagaaacaggatttttcccactctgtatgctatatttcaacagagcaggggccaagaacaagagctgaaaataaaaaacaggtctctgcgatccctcacccgcagctgcctgtatcacaaaagcgaagatcagcttcggcgcacgctggaagacgcggaggctctcttcagtaaatactgcgcgctgactcttaaggactagtttcgcgccctttctcaaatttaagcgcgaaaactacgtcatctccagcggccacacccggcgccagcacctgttgtcagcgccattttttagggcggagtaacttgtatgtgttgggaattgtagttttcttaaaatgggaagtgacgtaacgtgggaaaacggaagtgacgatttgaggaagttgtgggttttttggctttcgtttctgggcgtaggttcgcgtgcggttttctgggtgttttttgtggactttaaccgttacgtcattttttagtcctatatatactcgctctgcacttggcccttttttacactgtgactgattgagctggtgccgtgtcgagtggtgtttttttaataggttttcttttttactggtaaggctgactgttatgactacgtccggcgttccatttggcatgacactacgaccaacacgatctcggttgtctcggcgcactccgtacagtagggatcgtctacctccttttgagacagaaacccgcgctaccatactggaggatcatccgctgctgcccgaatgtaacactttgacaatgcacaacgtgagttacgtgcgaggtcttccctgcagtgtgggatttacgctgattcaggaatgggttgttccctgggatatggttctaacgcgggaggagcttgtaatcctgaggaagtgtatgcacgtgtgcctgtgttgtgccaacattgatatcatgacgagcatgatgatccatggttacgagtcctgggctctccactgtcattgttccagtcccggttccctgcagtgtatagccggcgggcaggttttggccagctggtttaggatggtggtggatggcgccatgtttaatcagaggtttatatggtaccgggaggtggtgaattacaacatgccaaaagaggtaatgtttatgtccagcgtgtttatgaggggtcgccacttaatctacctgcgcttgtggtatgatggccacgtgggttctgtggtccccgccatgagctttggatacagcgccttgcactgtgggattttgaacaatattgtggtgctgtgctgcagttactgtgctgatttaagtgagatcagggtgcgctgctgtgcccggaggacaaggcgccttatgctgcgggcggtgcgaatcatcgctgaggagaccactgccatgttgtattcctgcaggacggagcggcggcggcagcagtttattcgcgcgctgctgcagcaccaccgccctatcctgatgcacgattatgactctacccccatgtaggcgtggacttctccttcgccgcccgttaagcaaccgcaagttggacagcagcctgtggctcagcagctggacagcgacatgaacttaagtgagctgcccggggagtttattaatatcactgatgagcgtttggctcgacaggaaaccgtgtggaatataacacctaagaatatgtctgttacccatgatatgatgctttttaaggccagccggggagaaaggactgtgtactctgtgtgttgggagggaggtggcaggttgaatactagggttctgtgagtttgattaaggtacggtgatctgtataagctatgtggtggtggggctatactactgaatgaaaaatgacttgaaattttctgcaattgaaaaataaacacgttgaaacataacacaaacgattctttattcttgggcaatgtatgaaaaagtgtaagaggatgtggcaaatatttcattaatgtagttgtggccagaccagtcccatgaaaatgacatagagtatgcacttggagttgtgtctcctgtttcctgtgtaccgtttagtgtaatggttagtgttacaggtttagttttgtctccgtttaagtaaacttgactgacaatgttacttttggcagttttaccgtgagattttggataagctgataggttaggcataaatccaacagcgtttgtataggctgtcgcccctcctgacgcggtaggaggaggggagggtgccctgcatgtctgccgctgctcttgctcttgccgctgctgaggaggggggcgcatctgccgcagcaccggatgcatctgggaaaagcaaaaaaggggctcgtccctgtttccggaggaatttgcaagcggggtcttgcatgacggggaggcaaacccccgttcgccgcagtccggccggtccgagactcgaaccgggggtcccgcgactcaacccttggaaaataaccctccggctacagggagcgagccacttaatgctttcgctttccagcctaaccgcttacgctgcgcgcggccagtggccaaaaaagctagcgcagcagccgccgcgcctggaaggaagccaaaaggagcactcccccgttgtctgacgtcgcacacctgggttcgacacgcgggcggtaaccgcatggatcacggcggacggccggatacggggctcgaaccccggtcgtccgccatgatacccttgcgaatttatccaccagaccacggaagagtgcccgcttacaggctctccttttgcacggtctagagcgtcaacgattgcgcgcgcctgaccggccagagcgtcccgaccatggagcactttttgccgctgcgcaacatctggaaccgcgtccgcgactttccgcgcgcctccaccaccgccgccggcatcacctggatgtccaggtacatctacggata

SEQ ID NO: 174 - DNA, 12579 bp, synthetic construct
  source 1..12579: mol_type = other DNA
tcgcgcgtttcggtgatgacggtgaaaacctctgacacatgcagctcccggagacggtcacagcttgtctgtaagcggatgccgggagcagacaagcccgtcagggcgcgtcagcgggtgttggcgggtgtcggggctggcttaactatgcggcatcagagcagattgtactgagagtgcaccatatgcggtgtgaaataccgcacagatgcgtaaggagaaaataccgcatcaggcgccattcgccattcaggctgcgcaactgttgggaagggcgatcggtgcgggcctcttcgctattacgccagctggcgaaagggggatgtgctgcaaggcgattaagttgggtaacgccagggttttcccagtcacgacgttgtaaaacgacggccagagaattccgcagggtctccattttgaagcgggaggtttgaacgcgcagccgccatgccggggttttacgagattgtgattaaggtccccagcgaccttgacgagcatctgcccggcatttctgacagctttgtgaactgggtggccgagaaggaatgggagttgccgccagattctgacatggatctgaatctgattgagcaggcacccctgaccgtggccgagaagctgcagcgcgactttctgacggaatggcgccgtgtgagtaaggccccggaggctcttttctttgtgcaatttgagaagggagagagctacttccacatgcacgtgctcgtggaaaccaccggggtgaaatccatggttttgggacgtttcctgagtcagattcgcgaaaaactgattcagagaatttaccgcgggatcgagccgactttgccaaactggttcgcggtcacaaagaccagaaatggcgccggaggcgggaacaaggtggtggatgagtgctacatccccaattacttgctccccaaaacccagcctgagctccagtgggcgtggactaatatggaacagtatttaagcgcctgtttgaatctcacggagcgtaaacggttggtggcgcagcatctgacgcacgtgtcgcagacgcaggagcagaacaaagagaatcagaatcccaattctgatgcgccggtgatcagatcaaaaacttcagccaggtacatggagctggtcgggtggctcgtggacaaggggattacctcggagaagcagtggatccaggaggaccaggcctcatacatctccttcaatgcggcctccaactcgcggtcccaaatcaaggctgccttggacaatgcgggaaagattatgagcctgactaaaaccgcccccgactacctggtgggccagcagcccgtggaggacatttccagcaatcggatttataaaattttggaactaaacgggtacgatccccaatatgcggcttccgtctttctgggatgggccacgaaaaagttcggcaagaggaacaccatctggctgtttgggcctgcaactaccgggaagaccaacatcgcggaggccatagcccacactgtgcccttctacgggtgcgtaaactggaccaatgagaactttcccttcaacgactgtgtcgacaagatggtgatctggtgggaggaggggaagatgaccgccaaggtcgtggagtcggccaaagccattctcggaggaagcaaggtgcgcgtggaccagaaatgcaagtcctcggcccagatagacccgactcccgtgatcgtcacctccaacaccaacatgtgcgccgtgattgacgggaactcaacgaccttcgaacaccagcagccgttgcaagaccggatgttcaaatttgaactcacccgccgtctggatcatgactttgggaaggtcaccaagcaggaagtcaaagactttttccggtgggcaaaggatcacgtggttgaggtggagcatgaattctacgtcaaaaagggtggagccaagaaaagacccgcccccagtgacgcagatataagtgagcccaaacgggtgcgcgagtcagttgcgcagccatcgacgtcagacgcggaagcttcgatcaactacgcagacaggtaccaaaacaaatgttctcgtcacgtgggcatgaatctgatgctgtttccctgcagacaatgcgagagaatgaatcagaattcaaatatctgcttcactcacggacagaaagactgtttagagtgctttcccgtgtcagaatctcaacccgtttctgtcgtcaaaaaggcgtatcagaaactgtgctacattcatcatatcatgggaaaggtgccagacgcttgcactgcctgcgatctggtcaatgtggatttggatgactgcatctttgaacaataaatgatttaaatcaggtatggctgccgatggttatcttccagattggctcgaggacactctctctgaaggaataagacagtggtggaagctcaaacctggcccaccaccaccaaagcccgcagagcggcataaggacgacagcaggggtcttgtgcttcctgggtacaagtacctcggacccttcaacggactcgacaagggagagccggtcaacgaggcagacgccgcggccctcgagcacgacaaagcctacgaccggcagctcgacagcggagacaacccgtacctcaagtacaaccacgccgacgcggagtttcaggagcgcctgaaagaagatacgtcttttgggggcaacctcggacgagcagtcttccaggcgaaaaagagggttcttgaacctctgggcctggttgaggaacctgttaagacggctccgggaaaaaagaggccggtagagcactctcctgtggagccagactcctcctcgggaaccggaaaggcgggccagcagcctgcaagaaaaagattgaattttggtcagactggagacgcagactcagtacctgacccccagcctctcggacagccaccagcagccccctctggtctgggaactaatacgatggctacaggcagtggcgcaccaatggcagacaataacgagggcgccgacggagtgggtaattcctcgggaaattggcattgcgattccacatggatgggcgacagagtcatcaccaccagcacccgaacctgggccctgcccacctacaacaaccacctctacaaacaaatttccagccaatcaggagcctcgaacgacaatcactactttggctacagcaccccttgggggtattttgacttcaacagattccactgccacttttcaccacgtgactggcaaagactcatcaacaacaactggggattccgacccaagagactcaacttcaagctctttaacattcaagtcaaagaggtcacgcagaatgacggtacgacgacgattgccaataaccttaccagcacggttcaggtgtttactgactcggagtaccagctcccgtacgtcctcggctcggcgcatcaaggatgcctcccgccgttcccagcagacgtcttcatggtgccacagtatggatacctcaccctgaacaacgggagtcaggcagtaggacgctcttcattttactgcctggagtactttccttctcagatgctgcgtaccggaaacaactttaccttcagctacacttttgaggacgttcctttccacagcagctacgctcacagccagagtctggaccgtctcatgaatcctctcatcgaccagtacctgtattacttgagcagaacaaacactccaagtggaaccaccacgcagtcaaggcttcagttttctcaggccggagcgagtgacattcgggaccagtctaggaactggcttcctggaccctgttaccgccagcagcgagtatcaaagacatctgcggataacaacaacagtgaatactcgtggactggagctaccaagtaccacctcaatggcagagactctctggtgaatccgggcccggccatggcaagccacaaggacgatgaagaaaagttttttcctcagagcggggttctcatctttgggaagcaaggctcagagaaaacaaatgtggacattgaaaaggtcatgattacagacgaagaggaaatcaggacaaccaatcccgtggctacggagcagtatggttctgtatctaccaacctccagagaggcaacagacaagcagctaccgcagatgtcaacacacaaggcgttcttccaggcatggtctggcaggacagagatgtgtaccttcaggggcccatctgggcaaagattccacacacggacggacattttcacccctctcccctcatgggtggattcggacttaaacaccctcctccacagattctcatcaagaacaccccggtacctgcgaatccttcgaccaccttcagtgcggcaaagtttgcttccttcatcacacagtactccacgggacaggtcagcgtggagatcgagtgggagctgcagaaggaaaacagcaaacgctggaatcccgaaattcagtacacttccaactacaacaagtctgttaatgtggactttactgtggacactaatggcgtgtattcagagcctcgccccattggcaccagatacctgactcgtaatctgtaattgcctgttaatcaataaaccggttgattcgtttcagttgaactttggtctctgcgaagggcgaattcgtttaaacctgcaggactagagccgaattctgcatcgcgatagggataacagggtaataaataatgtactagagacactttcaataaaggcaaatgcttttatttgtacactctcgggtgattatttacccccacccttgccgtctgcgccgtttaaaaatcaaaggggttctgccgcgcatcgctatgcgccactggcagggacacgttgcgatactggtgtttagtgctccacttaaactcaggcacaaccatccgcggcagctcggtgaagttttcactccacaggctgcgcaccatcaccaacgcgtttagcaggtcgggcgccgatatcttgaagtcgcagttggggcctccgccctgcgcgcgcgagttgcgatacacagggttgcagcactggaacactatcagcgccgggtggtgcacgctggccagcacgctcttgtcggagatcagatccgcgtccaggtcctccgcgttgctcagggcgaacggagtcaactttggtagctgccttcccaaaaagggcgcgtgcccaggctttgagttgcactcgcaccgtagtggcatcaaaaggtgaccgtgcccggtctgggcgttaggatacagcgcctgcataaaagccttgatctgcttaaaagccacctgagcctttgcgccttcagagaagaacatgccgcaagacttgccggaaaactgattggccggacaggccgcgtcgtgcacgcagcaccttgcgtcggtgttggagatctgcaccacatttcggccccaccggttcttcacgatcttggccttgctagactgctccttcagcgcgcgctgcccgttttcgctcgtcacatccatttcaatcacgtgctccttatttatcataatgcttccgtgtagacacttaagctcgccttcgatctcagcgcagcggtgcagccacaacgcgcagcccgtgggctcgtgatgcttgtaggtcacctctgcaaacgactgcaggtacgcctgcaggaatcgccccatcatcgtcacaaaggtcttgttgctggtgaaggtcagctgcaacccgcggtgctcctcgttcagccaggtcttgcatacggccgccagagcttccacttggtcaggcagtagtttgaagttcgcctttagatcgttatccacgtggtacttgtccatcagcgcgcgcgcagcctccatgcccttctcccacgcagacacgatcggcacactcagcgggttcatcaccgtaatttcactttccgcttcgctgggctcttcctcttcctcttgcgtccgcataccacgcgccactgggtcgtcttcattcagccgccgcactgtgcgcttacctcctttgccatgcttgattagcaccggtgggttgctgaaacccaccatttgtagcgccacatcttctctttcttcctcgctgtccacgattacctctggtgatggcgggcgctcgggcttgggagaagggcgcttctttttcttcttgggcgcaatggccaaatccgccgccgaggtcgatggccgcgggctgggtgtgcgcggcaccagcgcgtcttgtgatgagtcttcctcgtcctcggactcgatacgccgcctcatccgcttttttgggggcgcccggggaggcggcggcgacggggacggggacgacacgtcctccatggttgggggacgtcgcgccgcaccgcgtccgcgctcgggggtggtttcgcgctgctcctcttcccgactggccatttccttctcctataggcagaaaaagatcgttgaaactcactccggggctgtggacgtcggcttaccttcgcaaatttgtacctgaggactaccacgcccacgagattaggttctacgaagaccaatcccgcccgcctaatgcggagcttaccgcctgcgtcattacccagggccacattcttggccaattgcaagccatcaacaaagcccgccaagagtttctgctacgaaagggacggggggtttacttggacccccagtccggcgaggagctcaacccaatccccccgccgccgcagccctatcagcagcagccgcgggcccttgcttcccaggatggcacccaaaaagaagctgcagctgccgccgccacccacggacgaggaggaatactgggacagtcaggcagaggaggttttggacgaggaggaggaggacatgatggaagactgggagagcctagacgaggaagcttccgaggtcgaagaggtgtcagacgaaacaccgtcaccctcggtcgcattcccctcgccggcgccccagaaatcggcaaccggttccagcatggctacaacctccgctcctcaggcgccgccggcactgcccgttcgccgacccaaccgtagatgggacaccactggaaccagggccggtaagtccaagcagccgccgccgttagcccaagagcaacaacagcgccaaggctaccgctcatggcgcgggcacaagaacgccatagttgcttgcttgcaagactgtgggggcaacatctccttcgcccgccgctttcttctctaccatcacggcgtggccttcccccgtaacatcctgcattactaccgtcatctctacagcccatactgcaccggcggcagcggcagcaacagcagcggccacacagaagcaaaggcgaccggatagcaagactctgacaaagcccaagaaatccacagcggcggcagcagcaggaggaggagcgctgcgtctggcgcccaacgaacccgtatcgacccgcgagcttagaaacaggatttttcccactctgtatgctatatttcaacagagcaggggccaagaacaagagctgaaaataaaaaacaggtctctgcgatccctcacccgcagctgcctgtatcacaaaagcgaagatcagcttcggcgcacgctggaagacgcggaggctctcttcagtaaatactgcgcgctgactcttaaggactagtttcgcgccctttctcaaatttaagcgcgaaaactacgtcatctccagcggccacacccggcgccagcacctgttgtcagcgccattttttagggcggagtaacttgtatgtgttgggaattgtagttttcttaaaatgggaagtgacgtaacgtgggaaaacggaagtgacgatttgaggaagttgtgggttttttggctttcgtttctgggcgtaggttcgcgtgcggttttctgggtgttttttgtggactttaaccgttacgtcattttttagtcctatatatactcgctctgcacttggcccttttttacactgtgactgattgagctggtgccgtgtcgagtggtgtttttttaataggttttcttttttactggtaaggctgactgttatgactacgtccggcgttccatttggcatgacactacgaccaacacgatctcggttgtctcggcgcactccgtacagtagggatcgtctacctccttttgagacagaaacccgcgctaccatactggaggatcatccgctgctgcccgaatgtaacactttgacaatgcacaacgtgagttacgtgcgaggtcttccctgcagtgtgggatttacgctgattcaggaatgggttgttccctgggatatggttctaacgcgggaggagcttgtaatcctgaggaagtgtatgcacgtgtgcctgtgttgtgccaacattgatatcatgacgagcatgatgatccatggttacgagtcctgggctctccactgtcattgttccagtcccggttccctgcagtgtatagccggcgggcaggttttggccagctggtttaggatggtggtggatggcgccatgtttaatcagaggtttatatggtaccgggaggtggtgaattacaacatgccaaaagaggtaatgtttatgtccagcgtgtttatgaggggtcgccacttaatctacctgcgcttgtggtatgatggccacgtgggttctgtggtccccgccatgagctttggatacagcgccttgcactgtgggattttgaacaatattgtggtgctgtgctgcagttactgtgctgatttaagtgagatcagggtgcgctgctgtgcccggaggacaaggcgccttatgctgcgggcggtgcgaatcatcgctgaggagaccactgccatgttgtattcctgcaggacggagcggcggcggcagcagtttattcgcgcgctgctgcagcaccaccgccctatcctgatgcacgattatgactctacccccatgtaggcgtggacttctccttcgccgcccgttaagcaaccgcaagttggacagcagcctgtggctcagcagctggacagcgacatgaacttaagtgagctgcccggggagtttattaatatcactgatgagcgtttggctcgacaggaaaccgtgtggaatataacacctaagaatatgtctgttacccatgatatgatgctttttaaggccagccggggagaaaggactgtgtactctgtgtgttgggagggaggtggcaggttgaatactagggttctgtgagtttgattaaggtacggtgatctgtataagctatgtggtggtggggctatactactgaatgaaaaatgacttgaaattttctgcaattgaaaaataaacacgttgaaacataacacaaacgattctttattcttgggcaatgtatgaaaaagtgtaagaggatgtggcaaatatttcattaatgtagttgtggccagaccagtcccatgaaaatgacatagagtatgcacttggagttgtgtctcctgtttcctgtgtaccgtttagtgtaatggttagtgttacaggtttagttttgtctccgtttaagtaaacttgactgacaatgttacttttggcagttttaccgtgagattttggataagctgataggttaggcataaatccaacagcgtttgtataggctgtcgcccctcctgacgcggtaggaggaggggagggtgccctgcatgtctgccgctgctcttgctcttgccgctgctgaggaggggggcgcatctgccgcagcaccggatgcatctgggaaaagcaaaaaaggggctcgtccctgtttccggaggaatttgcaagcggggtcttgcatgacggggaggcaaacccccgttcgccgcagtccggccggtccgagactcgaaccgggggtcccgcgactcaacccttggaaaataaccctccggctacagggagcgagccacttaatgctttcgctttccagcctaaccgcttacgctgcgcgcggccagtggccaaaaaagctagcgcagcagccgccgcgcctggaaggaagccaaaaggagcactcccccgttgtctgacgtcgcacacctgggttcgacacgcgggcggtaaccgcatggatcacggcggacggccggatacggggctcgaaccccggtcgtccgccatgatacccttgcgaatttatccaccagaccacggaagagtgcccgcttacaggctctccttttgcacggtctagagcgtcaacgattgcgcgcgcctgaccggccagagcgtcccgaccatggagcactttttgccgctgcgcaacatctggaaccgcgtccgcgactttccgcgcgcctccaccaccgccgccggcatcacctggatgtccaggtacatctacggatatggcaaacagctattatgggtattatgggtgcggccgcggatcccgggcccgtcgactgcagaggcctgcatgcaagcttggtgtaatcatggtcatagctgtttcctgtgtgaaattgttatccgctcacaattccacacaacatacgagccggaagcataaagtgtaaagcctggggtgcctaatgagtgagctaactcacattaattgcgttgcgctcactgcccgctttccagtcgggaaacctgtcgtgccagctgcattaatgaatcggccaacgcgcggggagaggcggtttgcgtattgggcgctcttccgcttcctcgctcactgactcgctgcgctcggtcgttcggctgcggcgagcggtatcagctcactcaaaggcggtaatacggttatccacagaatcaggggataacgcaggaaagaacatgtgagcaaaaggccagcaaaaggccaggaaccgtaaaaaggccgcgttgctggcgtttttccataggctccgcccccctgacgagcatcacaaaaatcgacgctcaagtcagaggtggcgaaacccgacaggactataaagataccaggcgtttccccctggaagctccctcgtgcgctctcctgttccgaccctgccgcttaccggatacctgtccgcctttctcccttcgggaagcgtggcgctttctcatagctcacgctgtaggtatctcagttcggtgtaggtcgttcgctccaagctgggctgtgtgcacgaaccccccgttcagcccgaccgctgcgccttatccggtaactatcgtcttgagtccaacccggtaagacacgacttatcgccactggcagcagccactggtaacaggattagcagagcgaggtatgtaggcggtgctacagagttcttgaagtggtggcctaactacggctacactagaagaacagtatttggtatctgcgctctgctgaagccagttaccttcggaaaaagagttggtagctcttgatccggcaaacaaaccaccgctggtagcggtggtttttttgtttgcaagcagcagattacgcgcagaaaaaaaggatctcaagaagatcctttgatcttttctacggggtctgacgctcagtggaacgaaaactcacgttaagggattttggtcatgagattatcaaaaaggatcttcacctagaaggtcctgtattagaggtcacgtgagtgttttgcgacattttgcgacaccatgtggtcacgctgggtatttaagcccgagtgagcacgcagggtctccattttgaagcgggaggtttgaacgcgcagccgccatccttttaaattaaaaatgaagttttaaatcaagcccaatctgaataatgttacaaccaattaaccaattctgattagaaaaactcatcgagcatcaaatgaaactgcaatttattcatatcaggattatcaataccatatttttgaaaaagccgtttctgtaatgaaggagaaaactcaccgaggcagttccataggatggcaagatcctggtatcggtctgcgattccgactcgtccaacatcaatacaacctattaatttcccctcgtcaaaaataaggttatcaagtgagaaatcaccatgagtgacgactgaatccggtgagaatggcaaaagtttatgcatttctttccagacttgttcaacaggccagccattacgctcgtcatcaaaatcactcgcatcaaccaaaccgttattcattcgtgattgcgcctgagcgagacgaaatacgcgatcgctgttaaaaggacaattacaaacaggaatcgaatgcaaccggcgcaggaacactgccagcgcatcaacaatattttcacctgaatcaggatattcttctaatacctggaatgctgtttttccggggatcgcagtggtgagtaaccatgcatcatcaggagtacggataaaatgcttgatggtcggaagaggcataaattccgtcagccagtttagtctgaccatctcatctgtaacatcattggcaacgctacctttgccatgtttcagaaacaactctggcgcatcgggcttcccatacaagcgatagattgtcgcacctgattgcccgacattatcgcgagcccatttatacccatataaatcagcatccatgttggaatttaatcgcggcctcgacgtttcccgttgaatatggctcataacaccccttgtattactgtttatgtaagcagacagttttattgttcatgatgatatatttttatcttgtgcaatgtaacatcagagattttgagacacgggccagagctgca

SEQ ID NO: 175 - DNA, 5505 bp, synthetic construct; identical to SEQ ID NO: 25
  source 1..5505: mol_type = other DNA

SEQ ID NO: 176 - DNA, 2208 bp, synthetic construct
  source 1..2208: mol_type = other DNA
atggctgccgatggttatcttccagattggctcgaggacactctctctgaaggaataagacagtggtggaagctcaaacctggcccaccaccaccaaagcccgcagagcggcataaggacgacagcaggggtcttgtgcttcctgggtacaagtacctcggacccttcaacggactcgacaagggagagccggtcaacgaggcagacgccgcggccctcgagcacgacaaagcctacgaccggcagctcgacagcggagacaacccgtacctcaagtacaaccacgccgacgcggagtttcaggagcgccttaaagaagatacgtcttttgggggcaacctcggactagcagtcttccaggcgaaaaagagggttcttgaacctctgggcctggttgaggaacctgttaagacggctccgggaaaaaagaggccggtagagcactctcctgtggagccagactcctcctcgggaaccggaaaggcgggccagcagcctgcaagaaaaagattgaattttggtcagactggagacgcagactcagtacctgacccccagcctctcggacagccaccagcagccccctctggtctgggaactaatacgatggctacaggcagtggcgcaccaatggcagacaataacgagggcgccgacggagtgggtaattcctcgggaaattggcattgcgattccacatggatgggcgacagagtcatcaccaccagcacccgaacctgggccctgcccacctacaacaaccacctctacaaacaaatttccagccaatcaggagcctcgaacgacaatcactactttggctacagcaccccttgggggtattttgacttcaacagattccactgccacttttcaccacgtgactggcaaagactcatcaacaacaactggggattccgacccaagagactcaacttcaagctctttaacattcaagtcaaagaggtcacgcagaatgacggtacgacgacgattgccaataaccttaccagcacggttcaggtgtttactgactcggagtaccagctcccgtacgtcctcggctcggcgcatcaaggatgcctcccgccgttcccagcagacgtcttcatggtgccacagtatggatacctcaccctgaacaacgggagtcaggcagtaggacgctcttcattttactgcctggagtactttccttctcagatgctgcgtaccggaaacaactttaccttcagctacacttttgaggacgttcctttccacagcagctacgctcacagccagagtctggaccgtctcatgaatcctctcatcgaccagtacctgtattacttgagcagaacaaacactccaagtggaaccaccacgcagtcaaggcttcagttttctcaggccggagcgagtgacattcgggaccagtctaggaactggcttcctggaccctgttaccgccagcagcgagtatcaaagacatctgcggataacaacaacagtgaatactcgtggactggagctaccaagtaccacctcaatggcagagactctctggtgaatccgggcccggccatggcaagccacaaggacgatgaagaaaagttttttcctcagagcggggttctcatctttgggaagcaaggctcagagaaaacaaatgtggacattgaaaaggtcatgattacagacgaagaggaaatcaggacaaccaatcccgtggctacggagcagtatggttctgtatctaccaacctccagagaggcaacagacaagcagctaccgcagatgtcaacacacaaggcgttcttccaggcatggtctggcaggacagagatgtgtaccttcaggggcccatctgggcaaagattccacacacggacggacattttcacccctctcccctcatgggtggattcggacttaaacaccctcctccacagattctcatcaagaacaccccggtacctgcgaatccttcgaccaccttcagtgcggcaaagtttgcttccttcatcacacagtactccacgggacaggtcagcgtggagatcgagtgggagctgcagaaggaaaacagcaaacgctggaatcccgaaattcagtacacttccaactacaacaagtctgttaatgtggactttactgtggacactaatggcgtgtattcagagcctcgccccattggcaccagatacctgactcgtaatctgtaa

SEQ ID NO: 177 - DNA, 4090 bp, synthetic construct
  source 1..4090: mol_type = other DNA
atgccggggttttacgagattgtgattaaggtccccagcgaccttgacgagcatctgcccggcatttctgacagctttgtgaactgggtggccgagaaggaatgggagttgccgccagattctgacatggatctgaatctgattgagcaggcacccctgaccgtggccgagaagctgcagcgcgactttctgacggaatggcgccgtgtgagtaaggccccggaggctcttttctttgtgcaatttgagaagggagagagctacttccacatgcacgtgctcgtggaaaccaccggggtgaaatccatggttttgggacgtttcctgagtcagattcgcgaaaaactgattcagagaatttaccgcgggatcgagccgactttgccaaactggttcgcggtcacaaagaccagaaatggcgccggaggcgggaacaaggtggtggatgagtgctacatccccaattacttgctccccaaaacccagcctgagctccagtgggcgtggactaatatggaacagtatttaagcgcctgtttgaatctcacggagcgtaaacggttggtggcgcagcatctgacgcacgtgtcgcagacgcaggagcagaacaaagagaatcagaatcccaattctgatgcgccggtgatcagatcaaaaacttcagccaggtacatggagctggtcgggtggctcgtggacaaggggattacctcggagaagcagtggatccaggaggaccaggcctcatacatctccttcaatgcggcctccaactcgcggtcccaaatcaaggctgccttggacaatgcgggaaagattatgagcctgactaaaaccgcccccgactacctggtgggccagcagcccgtggaggacatttccagcaatcggatttataaaattttggaactaaacgggtacgatccccaatatgcggcttccgtctttctgggatgggccacgaaaaagttcggcaagaggaacaccatctggctgtttgggcctgcaactaccgggaagaccaacatcgcggaggccatagcccacactgtgcccttctacgggtgcgtaaactggaccaatgagaactttcccttcaacgactgtgtcgacaagatggtgatctggtgggaggaggggaagatgaccgccaaggtcgtggagtcggccaaagccattctcggaggaagcaaggtgcgcgtggaccagaaatgcaagtcctcggcccagatagacccgactcccgtgatcgtcacctccaacaccaacatgtgcgccgtgattgacgggaactcaacgaccttcgaacaccagcagccgttgcaagaccggatgttcaaatttgaactcacccgccgtctggatcatgactttgggaaggtcaccaagcaggaagtcaaagactttttccggtgggcaaaggatcacgtggttgaggtggagcatgaattctacgtcaaaaagggtggagccaagaaaagacccgcccccagtgacgcagatataagtgagcccaaacgggtgcgcgagtcagttgcgcagccatcgacgtcagacgcggaagcttcgatcaactacgcagacaggtaccaaaacaaatgttctcgtcacgtgggcatgaatctgatgctgtttccctgcagacaatgcgagagaatgaatcagaattcaaatatctgcttcactcacggacagaaagactgtttagagtgctttcccgtgtcagaatctcaacccgtttctgtcgtcaaaaaggcgtatcagaaactgtgctacattcatcatatcatgggaaaggtgccagacgcttgcactgcctgcgatctggtcaatgtggatttggatgactgcatctttgaacaataaatgatttaaatcaggtatggctgccgatggttatcttccagattggctcgaggacactctctctgaaggaataagacagtggtggaagctcaaacctggcccaccaccaccaaagcccgcagagcggcataaggacgacagcaggggtcttgtgcttcctgggtacaagtacctcggacccttcaacggactcgacaagggagagccggtcaacgaggcagacgccgcggccctcgagcacgacaaagcctacgaccggcagctcgacagcggagacaacccgtacctcaagtacaaccacgccgacgcggagtttcaggagcgccttaaagaagatacgtcttttgggggcaacctcggactagcagtcttccaggcgaaaaagagggttcttgaacctctgggcctggttgaggaacctgttaagacggctccgggaaaaaagaggccggtagagcactctcctgtggagccagactcctcctcgggaaccggaaaggcgggccagcagcctgcaagaaaaagattgaattttggtcagactggagacgcagactcagtacctgacccccagcctctcggacagccaccagcagccccctctggtctgggaactaatacgatggctacaggcagtggcgcaccaatggcagacaataacgagggcgccgacggagtgggtaattcctcgggaaattggcattgcgattccacatggatgggcgacagagtcatcaccaccagcacccgaacctgggccctgcccacctacaacaaccacctctacaaacaaatttccagccaatcaggagcctcgaacgacaatcactactttggctacagcaccccttgggggtattttgacttcaacagattccactgccacttttcaccacgtgactggcaaagactcatcaacaacaactggggattccgacccaagagactcaacttcaagctctttaacattcaagtcaaagaggtcacgcagaatgacggtacgacgacgattgccaataaccttaccagcacggttcaggtgtttactgactcggagtaccagctcccgtacgtcctcggctcggcgcatcaaggatgcctcccgccgttcccagcagacgtcttcatggtgccacagtatggatacctcaccctgaacaacgggagtcaggcagtaggacgctcttcattttactgcctggagtactttccttctcagatgctgcgtaccggaaacaactttaccttcagctacacttttgaggacgttcctttccacagcagctacgctcacagccagagtctggaccgtctcatgaatcctctcatcgaccagtacctgtattacttgagcagaacaaacactccaagtggaaccaccacgcagtcaaggcttcagttttctcaggccggagcgagtgacattcgggaccagtctaggaactggcttcctggaccctgttaccgccagcagcgagtatcaaagacatctgcggataacaacaacagtgaatactcgtggactggagctaccaagtaccacctcaatggcagagactctctggtgaatccgggcccggccatggcaagccacaaggacgatgaagaaaagttttttcctcagagcggggttctcatctttgggaagcaaggctcagagaaaacaaatgtggacattgaaaaggtcatgattacagacgaagaggaaatcaggacaaccaatcccgtggctacggagcagtatggttctgtatctaccaacctccagagaggcaacagacaagcagctaccgcagatgtcaacacacaaggcgttcttccaggcatggtctggcaggacagagatgtgtaccttcaggggcccatctgggcaaagattccacacacggacggacattttcacccctctcccctcatgggtggattcggacttaaacaccctcctccacagattctcatcaagaacaccccggtacctgcgaatccttcgaccaccttcagtgcggcaaagtttgcttccttcatcacacagtactccacgggacaggtcagcgtggagatcgagtgggagctgcagaaggaaaacagcaaacgctggaatcccgaaattcagtacacttccaactacaacaagtctgttaatgtggactttactgtggacactaatggcgtgtattcagagcctcgccccattggcaccagatacctgactcgtaatctgtaa

SEQ ID NO: 178 - DNA, 9816 bp, synthetic construct
  source 1..9816: mol_type = other DNA
atgccggggttttacgagattgtgattaaggtccccagcgaccttgacgagcatctgcccggcatttctgacagctttgtgaactgggtggccgagaaggaatgggagttgccgccagattctgacatggatctgaatctgattgagcaggcacccctgaccgtggccgagaagctgcagcgcgactttctgacggaatggcgccgtgtgagtaaggccccggaggctcttttctttgtgcaatttgagaagggagagagctacttccacatgcacgtgctcgtggaaaccaccggggtgaaatccatggttttgggacgtttcctgagtcagattcgcgaaaaactgattcagagaatttaccgcgggatcgagccgactttgccaaactggttcgcggtcacaaagaccagaaatggcgccggaggcgggaacaaggtggtggatgagtgctacatccccaattacttgctccccaaaacccagcctgagctccagtgggcgtggactaatatggaacagtatttaagcgcctgtttgaatctcacggagcgtaaacggttggtggcgcagcatctgacgcacgtgtcgcagacgcaggagcagaacaaagagaatcagaatcccaattctgatgcgccggtgatcagatcaaaaacttcagccaggtacatggagctggtcgggtggctcgtggacaaggggattacctcggagaagcagtggatccaggaggaccaggcctcatacatctccttcaatgcggcctccaactcgcggtcccaaatcaaggctgccttggacaatgcgggaaagattatgagcctgactaaaaccgcccccgactacctggtgggccagcagcccgtggaggacatttccagcaatcggatttataaaattttggaactaaacgggtacgatccccaatatgcggcttccgtctttctgggatgggccacgaaaaagttcggcaagaggaacaccatctggctgtttgggcctgcaactaccgggaagaccaacatcgcggaggccatagcccacactgtgcccttctacgggtgcgtaaactggaccaatgagaactttcccttcaacgactgtgtcgacaagatggtgatctggtgggaggaggggaagatgaccgccaaggtcgtggagtcggccaaagccattctcggaggaagcaaggtgcgcgtggaccagaaatgcaagtcctcggcccagatagacccgactcccgtgatcgtcacctccaacaccaacatgtgcgccgtgattgacgggaactcaacgaccttcgaacaccagcagccgttgcaagaccggatgttcaaatttgaactcacccgccgtctggatcatgactttgggaaggtcaccaagcaggaagtcaaagactttttccggtgggcaaaggatcacgtggttgaggtggagcatgaattctacgtcaaaaagggtggagccaagaaaagacccgcccccagtgacgcagatataagtgagcccaaacgggtgcgcgagtcagttgcgcagccatcgacgtcagacgcggaagcttcgatcaactacgcagacaggtaccaaaacaaatgttctcgtcacgtgggcatgaatctgatgctgtttccctgcagacaatgcgagagaatgaatcagaattcaaatatctgcttcactcacggacagaaagactgtttagagtgctttcccgtgtcagaatctcaacccgtttctgtcgtcaaaaaggcgtatcagaaactgtgctacattcatcatatcatgggaaaggtgccagacgcttgcactgcctgcgatctggtcaatgtggatttggatgactgcatctttgaacaataaatgatttaaatcaggtatggctgccgatggttatcttccagattggctcgaggacactctctctgaaggaataagacagtggtggaagctcaaacctggcccaccaccaccaaagcccgcagagcggcataaggacgacagcaggggtcttgtgcttcctgggtacaagtacctcggacccttcaacggactcgacaagggagagccggtcaacgaggcagacgccgcggccctcgagcacgacaaagcctacgaccggcagctcgacagcggagacaacccgtacctcaagtacaaccacgccgacgcggagtttcaggagcgccttaaagaagatacgtcttttgggggcaacctcggactagcagtcttccaggcgaaaaagagggttcttgaacctctgggcctggttgaggaacctgttaagacggctccgggaaaaaagaggccggtagagcactctcctgtggagccagactcctcctcgggaaccggaaaggcgggccagcagcctgcaagaaaaagattgaattttggtcagactggagacgcagactcagtacctgacccccagcctctcggacagccaccagcagccccctctggtctgggaactaatacgatggctacaggcagtggcgcaccaatggcagacaataacgagggcgccgacggagtgggtaattcctcgggaaattggcattgcgattccacatggatgggcgacagagtcatcaccaccagcacccgaacctgggccctgcccacctacaacaaccacctctacaaacaaatttccagccaatcaggagcctcgaacgacaatcactactttggctacagcaccccttgggggtattttgacttcaacagattccactgccacttttcaccacgtgactggcaaagactcatcaacaacaactggggattccgacccaagagactcaacttcaagctctttaacattcaagtcaaagaggtcacgcagaatgacggtacgacgacgattgccaataaccttaccagcacggttcaggtgtttactgactcggagtaccagctcccgtacgtcctcggctcggcgcatcaaggatgcctcccgccgttcccagcagacgtcttcatggtgccacagtatggatacctcaccctgaacaacgggagtcaggcagtaggacgctcttcattttactgcctggagtactttccttctcagatgctgcgtaccggaaacaactttaccttcagctacacttttgaggacgttcctttccacagcagctacgctcacagccagagtctggaccgtctcatgaatcctctcatcgaccagtacctgtattacttgagcagaacaaacactccaagtggaaccaccacgcagtcaaggcttcagttttctcaggccggagcgagtgacattcgggaccagtctaggaactggcttcctggaccctgttaccgccagcagcgagtatcaaagacatctgcggataacaacaacagtgaatactcgtggactggagctaccaagtaccacctcaatggcagagactctctggtgaatccgggcccggccatggcaagccacaaggacgatgaagaaaagttttttcctcagagcggggttctcatctttgggaagcaaggctcagagaaaacaaatgtggacattgaaaaggtcatgattacagacgaagaggaaatcaggacaaccaatcccgtggctacggagcagtatggttctgtatctaccaacctccagagaggcaacagacaagcagctaccgcagatgtcaacacacaaggcgttcttccaggcatggtctggcaggacagagatgtgtaccttcaggggcccatctgggcaaagattccacacacggacggacattttcacccctctcccctcatgggtggattcggacttaaacaccctcctccacagattctcatcaagaacaccccggtacctgcgaatccttcgaccaccttcagtgcggcaaagtttgcttccttcatcacacagtactccacgggacaggtcagcgtggagatcgagtgggagctgcagaaggaaaacagcaaacgctggaatcccgaaattcagtacacttccaactacaacaagtctgttaatgtggactttactgtggacactaatggcgtgtattcagagcctcgccccattggcaccagatacctgactcgtaatctgtaattgcctgttaatcaataaaccggttgattcgtttcagttgaactttggtctctgcgaagggcgaattcgtttaaacctgcaggactagagccgaattctgcatcgcgatagggataacagggtaataaataatgtactagagacactttcaataaaggcaaatgcttttatttgtacactctcgggtgattatttacccccacccttgccgtctgcgccgtttaaaaatcaaaggggttctgccgcgcatcgctatgcgccactggcagggacacgttgcgatactggtgtttagtgctccacttaaactcaggcacaaccatccgcggcagctcggtgaagttttcactccacaggctgcgcaccatcaccaacgcgtttagcaggtcgggcgccgatatcttgaagtcgcagttggggcctccgccctgcgcgcgcgagttgcgatacacagggttgcagcactggaacactatcagcgccgggtggtgcacgctggccagcacgctcttgtcggagatcagatccgcgtccaggtcctccgcgttgctcagggcgaacggagtcaactttggtagctgccttcccaaaaagggcgcgtgcccaggctttgagttgcactcgcaccgtagtggcatcaaaaggtgaccgtgcccggtctgggcgttaggatacagcgcctgcataaaagccttgatctgcttaaaagccacctgagcctttgcgccttcagagaagaacatgccgcaagacttgccggaaaactgattggccggacaggccgcgtcgtgcacgcagcaccttgcgtcggtgttggagatctgcaccacatttcggccccaccggttcttcacgatcttggccttgctagactgctccttcagcgcgcgctgcccgttttcgctcgtcacatccatttcaatcacgtgctccttatttatcataatgcttccgtgtagacacttaagctcgccttcgatctcagcgcagcggtgcagccacaacgcgcagcccgtgggctcgtgatgcttgtaggtcacctctgcaaacgactgcaggtacgcctgcaggaatcgccccatcatcgtcacaaaggtcttgttgctggtgaaggtcagctgcaacccgcggtgctcctcgttcagccaggtcttgcatacggccgccagagcttccacttggtcaggcagtagtttgaagttcgcctttagatcgttatccacgtggtacttgtccatcagcgcgcgcgcagcctccatgcccttctcccacgcagacacgatcggcacactcagcgggttcatcaccgtaatttcactttccgcttcgctgggctcttcctcttcctcttgcgtccgcataccacgcgccactgggtcgtcttcattcagccgccgcactgtgcgcttacctcctttgccatgcttgattagcaccggtgggttgctgaaacccaccatttgtagcgccacatcttctctttcttcctcgctgtccacgattacctctggtgatggcgggcgctcgggcttgggagaagggcgcttctttttcttcttgggcgcaatggccaaatccgccgccgaggtcgatggccgcgggctgggtgtgcgcggcaccagcgcgtcttgtgatgagtcttcctcgtcctcggactcgatacgccgcctcatccgcttttttgggggcgcccggggaggcggcggcgacggggacggggacgacacgtcctccatggttgggggacgtcgcgccgcaccgcgtccgcgctcgggggtggtttcgcgctgctcctcttcccgactggccatttccttctcctataggcagaaaaagatcgttgaaactcactccggggctgtggacgtcggcttaccttcgcaaatttgtacctgaggactaccacgcccacgagattaggttctacgaagaccaatcccgcccgcctaatgcggagcttaccgcctgcgtcattacccagggccacattcttggccaattgcaagccatcaacaaagcccgccaagagtttctgctacgaaagggacggggggtttacttggacccccagtccggcgaggagctcaacccaatccccccgccgccgcagccctatcagcagcagccgcgggcccttgcttcccaggatggcacccaaaaagaagctgcagctgccgccgccacccacggacgaggaggaatactgggacagtcaggcagaggaggttttggacgaggaggaggaggacatgatggaagactgggagagcctagacgaggaagcttccgaggtcgaagaggtgtcagacgaaacaccgtcaccctcggtcgcattcccctcgccggcgccccagaaatcggcaaccggttccagcatggctacaacctccgctcctcaggcgccgccggcactgcccgttcgccgacccaaccgtagatgggacaccactggaaccagggccggtaagtccaagcagccgccgccgttagcccaagagcaacaacagcgccaaggctaccgctcatggcgcgggcacaagaacgccatagttgcttgcttgcaagactgtgggggcaacatctccttcgcccgccgctttcttctctaccatcacggcgtggccttcccccgtaacatcctgcattactaccgtcatctctacagcccatactgcaccggcggcagcggcagcaacagcagcggccacacagaagcaaaggcgaccggatagcaagactctgacaaagcccaagaaatccacagcggcggcagcagcaggaggaggagcgctgcgtctggcgcccaacgaacccgtatcgacccgcgagcttagaaacaggatttttcccactctgtatgctatatttcaacagagcaggggccaagaacaagagctgaaaataaaaaacaggtctctgcgatccctcacccgcagctgcctgtatcacaaaagcgaagatcagcttcggcgcacgctggaagacgcggaggctctcttcagtaaatactgcgcgctgactcttaaggactagtttcgcgccctttctcaaatttaagcgcgaaaactacgtcatctccagcggccacacccggcgccagcacctgttgtcagcgccattttttagggcggagtaacttgtatgtgttgggaattgtagttttcttaaaatgggaagtgacgtaacgtgggaaaacggaagtgacgatttgaggaagttgtgggttttttggctttcgtttctgggcgtaggttcgcgtgcggttttctgggtgttttttgtggactttaaccgttacgtcattttttagtcctatatatactcgctctgcacttggcccttttttacactgtgactgattgagctggtgccgtgtcgagtggtgtttttttaataggttttcttttttactggtaaggctgactgttatgactacgtccggcgttccatttggcatgacactacgaccaacacgatctcggttgtctcggcgcactccgtacagtagggatcgtctacctccttttgagacagaaacccgcgctaccatactggaggatcatccgctgctgcccgaatgtaacactttgacaatgcacaacgtgagttacgtgcgaggtcttccctgcagtgtgggatttacgctgattcaggaatgggttgttccctgggatatggttctaacgcgggaggagcttgtaatcctgaggaagtgtatgcacgtgtgcctgtgttgtgccaacattgatatcatgacgagcatgatgatccatggttacgagtcctgggctctccactgtcattgttccagtcccggttccctgcagtgtatagccggcgggcaggttttggccagctggtttaggatggtggtggatggcgccatgtttaatcagaggtttatatggtaccgggaggtggtgaattacaacatgccaaaagaggtaatgtttatgtccagcgtgtttatgaggggtcgccacttaatctacctgcgcttgtggtatgatggccacgtgggttctgtggtccccgccatgagctttggatacagcgccttgcactgtgggattttgaacaatattgtggtgctgtgctgcagttactgtgctgatttaagtgagatcagggtgcgctgctgtgcccggaggacaaggcgccttatgctgcgggcggtgcgaatcatcgctgaggagaccactgccatgttgtattcctgcaggacggagcggcggcggcagcagtttattcgcgcgctgctgcagcaccaccgccctatcctgatgcacgattatgactctacccccatgtaggcgtggacttctccttcgccgcccgttaagcaaccgcaagttggacagcagcctgtggctcagcagctggacagcgacatgaacttaagtgagctgcccggggagtttattaatatcactgatgagcgtttggctcgacaggaaaccgtgtggaatataacacctaagaatatgtctgttacccatgatatgatgctttttaaggccagccggggagaaaggactgtgtactctgtgtgttgggagggaggtggcaggttgaatactagggttctgtgagtttgattaaggtacggtgatctgtataagctatgtggtggtggggctatactactgaatgaaaaatgacttgaaattttctgcaattgaaaaataaacacgttgaaacataacacaaacgattctttattcttgggcaatgtatgaaaaagtgtaagaggatgtggcaaatatttcattaatgtagttgtggccagaccagtcccatgaaaatgacatagagtatgcacttggagttgtgtctcctgtttcctgtgtaccgtttagtgtaatggttagtgttacaggtttagttttgtctccgtttaagtaaacttgactgacaatgttacttttggcagttttaccgtgagattttggataagctgataggttaggcataaatccaacagcgtttgtataggctgtcgcccctcctgacgcggtaggaggaggggagggtgccctgcatgtctgccgctgctcttgctcttgccgctgctgaggaggggggcgcatctgccgcagcaccggatgcatctgggaaaagcaaaaaaggggctcgtccctgtttccggaggaatttgcaagcggggtcttgcatgacggggaggcaaacccccgttcgccgcagtccggccggtccgagactcgaaccgggggtcccgcgactcaacccttggaaaataaccctccggctacagggagcgagccacttaatgctttcgctttccagcctaaccgcttacgctgcgcgcggccagtggccaaaaaagctagcgcagcagccgccgcgcctggaaggaagccaaaaggagcactcccccgttgtctgacgtcgcacacctgggttcgacacgcgggcggtaaccgcatggatcacggcggacggccggatacggggctcgaaccccggtcgtccgccatgatacccttgcgaatttatccaccagaccacggaagagtgcccgcttacaggctctccttttgcacggtctagagcgtcaacgattgcgcgcgcctgaccggccagagcgtcccgaccatggagcactttttgccgctgcgcaacatctggaaccgcgtccgcgactttccgcgcgcctccaccaccgccgccggcatcacctggatgtccaggtacatctacggata

SEQ ID NO: 179 - DNA, 12579 bp, synthetic construct
  source 1..12579: mol_type = other DNA
tcgcgcgtttcggtgatgacggtgaaaacctctgacacatgcagctcccggagacggtcacagcttgtctgtaagcggatgccgggagcagacaagcccgtcagggcgcgtcagcgggtgttggcgggtgtcggggctggcttaactatgcggcatcagagcagattgtactgagagtgcaccatatgcggtgtgaaataccgcacagatgcgtaaggagaaaataccgcatcaggcgccattcgccattcaggctgcgcaactgttgggaagggcgatcggtgcgggcctcttcgctattacgccagctggcgaaagggggatgtgctgcaaggcgattaagttgggtaacgccagggttttcccagtcacgacgttgtaaaacgacggccagagaattccgcagggtctccattttgaagcgggaggtttgaacgcgcagccgccatgccggggttttacgagattgtgattaaggtccccagcgaccttgacgagcatctgcccggcatttctgacagctttgtgaactgggtggccgagaaggaatgggagttgccgccagattctgacatggatctgaatctgattgagcaggcacccctgaccgtggccgagaagctgcagcgcgactttctgacggaatggcgccgtgtgagtaaggccccggaggctcttttctttgtgcaatttgagaagggagagagctacttccacatgcacgtgctcgtggaaaccaccggggtgaaatccatggttttgggacgtttcctgagtcagattcgcgaaaaactgattcagagaatttaccgcgggatcgagccgactttgccaaactggttcgcggtcacaaagaccagaaatggcgccggaggcgggaacaaggtggtggatgagtgctacatccccaattacttgctccccaaaacccagcctgagctccagtgggcgtggactaatatggaacagtatttaagcgcctgtttgaatctcacggagcgtaaacggttggtggcgcagcatctgacgcacgtgtcgcagacgcaggagcagaacaaagagaatcagaatcccaattctgatgcgccggtgatcagatcaaaaacttcagccaggtacatggagctggtcgggtggctcgtggacaaggggattacctcggagaagcagtggatccaggaggaccaggcctcatacatctccttcaatgcggcctccaactcgcggtcccaaatcaaggctgccttggacaatgcgggaaagattatgagcctgactaaaaccgcccccgactacctggtgggccagcagcccgtggaggacatttccagcaatcggatttataaaattttggaactaaacgggtacgatccccaatatgcggcttccgtctttctgggatgggccacgaaaaagttcggcaagaggaacaccatctggctgtttgggcctgcaactaccgggaagaccaacatcgcggaggccatagcccacactgtgcccttctacgggtgcgtaaactggaccaatgagaactttcccttcaacgactgtgtcgacaagatggtgatctggtgggaggaggggaagatgaccgccaaggtcgtggagtcggccaaagccattctcggaggaagcaaggtgcgcgtggaccagaaatgcaagtcctcggcccagatagacccgactcccgtgatcgtcacctccaacaccaacatgtgcgccgtgattgacgggaactcaacgaccttcgaacaccagcagccgttgcaagaccggatgttcaaatttgaactcacccgccgtctggatcatgactttgggaaggtcaccaagcaggaagtcaaagactttttccggtgggcaaaggatcacgtggttgaggtggagcatgaattctacgtcaaaaagggtggagccaagaaaagacccgcccccagtgacgcagatataagtgagcccaaacgggtgcgcgagtcagttgcgcagccatcgacgtcagacgcggaagcttcgatcaactacgcagacaggtaccaaaacaaatgttctcgtcacgtgggcatgaatctgatgctgtttccctgcagacaatgcgagagaatgaatcagaattcaaatatctgcttcactcacggacagaaagactgtttagagtgctttcccgtgtcagaatctcaacccgtttctgtcgtcaaaaaggcgtatcagaaactgtgctacattcatcatatcatgggaaaggtgccagacgcttgcactgcctgcgatctggtcaatgtggatttggatgactgcatctttgaacaataaatgatttaaatcaggtatggctgccgatggttatcttccagattggctcgaggacactctctctgaaggaataagacagtggtggaagctcaaacctggcccaccaccaccaaagcccgcagagcggcataaggacgacagcaggggtcttgtgcttcctgggtacaagtacctcggacccttcaacggactcgacaagggagagccggtcaacgaggcagacgccgcggccctcgagcacgacaaagcctacgaccggcagctcgacagcggagacaacccgtacctcaagtacaaccacgccgacgcggagtttcaggagcgccttaaagaagatacgtcttttgggggcaacctcggactagcagtcttccaggcgaaaaagagggttcttgaacctctgggcctggttgaggaacctgttaagacggctccgggaaaaaagaggccggtagagcactctcctgtggagccagactcctcctcgggaaccggaaaggcgggccagcagcctgcaagaaaaagattgaattttggtcagactggagacgcagactcagtacctgacccccagcctctcggacagccaccagcagccccctctggtctgggaactaatacgatggctacaggcagtggcgcaccaatggcagacaataacgagggcgccgacggagtgggtaattcctcgggaaattggcattgcgattccacatggatgggcgacagagtcatcaccaccagcacccgaacctgggccctgcccacctacaacaaccacctctacaaacaaatttccagccaatcaggagcctcgaacgacaatcactactttggctacagcaccccttgggggtattttgacttcaacagattccactgccacttttcaccacgtgactggcaaagactcatcaacaacaactggggattccgacccaagagactcaacttcaagctctttaacattcaagtcaaagaggtcacgcagaatgacggtacgacgacgattgccaataaccttaccagcacggttcaggtgtttactgactcggagtaccagctcccgtacgtcctcggctcggcgcatcaaggatgcctcccgccgttcccagcagacgtcttcatggtgccacagtatggatacctcaccctgaacaacgggagtcaggcagtaggacgctcttcattttactgcctggagtactttccttctcagatgctgcgtaccggaaacaactttaccttcagctacacttttgaggacgttcctttccacagcagctacgctcacagccagagtctggaccgtctcatgaatcctctcatcgaccagtacctgtattacttgagcagaacaaacactccaagtggaaccaccacgcagtcaaggcttcagttttctcaggccggagcgagtgacattcgggaccagtctaggaactggcttcctggaccctgttaccgccagcagcgagtatcaaagacatctgcggataacaacaacagtgaatactcgtggactggagctaccaagtaccacctcaatggcagagactctctggtgaatccgggcccggccatggcaagccacaaggacgatgaagaaaagttttttcctcagagcggggttctcatctttgggaagcaaggctcagagaaaacaaatgtggacattgaaaaggtcatgattacagacgaagaggaaatcaggacaaccaatcccgtggctacggagcagtatggttctgtatctaccaacctccagagaggcaacagacaagcagctaccgcagatgtcaacacacaaggcgttcttccaggcatggtctggcaggacagagatgtgtaccttcaggggcccatctgggcaaagattccacacacggacggacattttcacccctctcccctcatgggtggattcggacttaaacaccctcctccacagattctcatcaagaacaccccggtacctgcgaatccttcgaccaccttcagtgcggcaaagtttgcttccttcatcacacagtactccacgggacaggtcagcgtggagatcgagtgggagctgcagaaggaaaacagcaaacgctggaatcccgaaattcagtacacttccaactacaacaagtctgttaatgtggactttactgtggacactaatggcgtgtattcagagcctcgccccattggcaccagatacctgactcgtaatctgtaattgcctgttaatcaataaaccggttgattcgtttcagttgaactttggtctctgcgaagggcgaattcgtttaaacctgcaggactagagccgaattctgcatcgcgatagggataacagggtaataaataatgtactagagacactttcaataaaggcaaatgcttttatttgtacactctcgggtgattatttacccccacccttgccgtctgcgccgtttaaaaatcaaaggggttctgccgcgcatcgctatgcgccactggcagggacacgttgcgatactggtgtttagtgctccacttaaactcaggcacaaccatccgcggcagctcggtgaagttttcactccacaggctgcgcaccatcaccaacgcgtttagcaggtcgggcgccgatatcttgaagtcgcagttggggcctccgccctgcgcgcgcgagttgcgatacacagggttgcagcactggaacactatcagcgccgggtggtgcacgctggccagcacgctcttgtcggagatcagatccgcgtccaggtcctccgcgttgctcagggcgaacggagtcaactttggtagctgccttcccaaaaagggcgcgtgcccaggctttgagttgcactcgcaccgtagtggcatcaaaaggtgaccgtgcccggtctgggcgttaggatacagcgcctgcataaaagccttgatctgcttaaaagccacctgagcctttgcgccttcagagaagaacatgccgcaagacttgccggaaaactgattggccggacaggccgcgtcgtgcacgcagcaccttgcgtcggtgttggagatctgcaccacatttcggccccaccggttcttcacgatcttggccttgctagactgctccttcagcgcgcgctgcccgttttcgctcgtcacatccatttcaatcacgtgctccttatttatcataatgcttccgtgtagacacttaagctcgccttcgatctcagcgcagcggtgcagccacaacgcgcagcccgtgggctcgtgatgcttgtaggtcacctctgcaaacgactgcaggtacgcctgcaggaatcgccccatcatcgtcacaaaggtcttgttgctggtgaaggtcagctgcaacccgcggtgctcctcgttcagccaggtcttgcatacggccgccagagcttccacttggtcaggcagtagtttgaagttcgcctttagatcgttatccacgtggtacttgtccatcagcgcgcgcgcagcctccatgcccttctcccacgcagacacgatcggcacactcagcgggttcatcaccgtaatttcactttccgcttcgctgggctcttcctcttcctcttgcgtccgcataccacgcgccactgggtcgtcttcattcagccgccgcactgtgcgcttacctcctttgccatgcttgattagcaccggtgggttgctgaaacccaccatttgtagcgccacatcttctctttcttcctcgctgtccacgattacctctggtgatggcgggcgctcgggcttgggagaagggcgcttctttttcttcttgggcgcaatggccaaatccgccgccgaggtcgatggccgcgggctgggtgtgcgcggcaccagcgcgtcttgtgatgagtcttcctcgtcctcggactcgatacgccgcctcatccgcttttttgggggcgcccggggaggcggcggcgacggggacggggacgacacgtcctccatggttgggggacgtcgcgccgcaccgcgtccgcgctcgggggtggtttcgcgctgctcctcttcccgactggccatttccttctcctataggcagaaaaagatcgttgaaactcactccggggctgtggacgtcggcttaccttcgcaaatttgtacctgaggactaccacgcccacgagattaggttctacgaagaccaatcccgcccgcctaatgcggagcttaccgcctgcgtcattacccagggccacattcttggccaattgcaagccatcaacaaagcccgccaagagtttctgctacgaaagggacggggggtttacttggacccccagtccggcgaggagctcaacccaatccccccgccgccgcagccctatcagcagcagccgcgggcccttgcttcccaggatggcacccaaaaagaagctgcagctgccgccgccacccacggacgaggaggaatactgggacagtcaggcagaggaggttttggacgaggaggaggaggacatgatggaagactgggagagcctagacgaggaagcttccgaggtcgaagaggtgtcagacgaaacaccgtcaccctcggtcgcattcccctcgccggcgccccagaaatcggcaaccggttccagcatggctacaacctccgctcctcaggcgccgccggcactgcccgttcgccgacccaaccgtagatgggacaccactggaaccagggccggtaagtccaagcagccgccgccgttagcccaagagcaacaacagcgccaaggctaccgctcatggcgcgggcacaagaacgccatagttgcttgcttgcaagactgtgggggcaacatctccttcgcccgccgctttcttctctaccatcacggcgtggccttcccccgtaacatcctgcattactaccgtcatctctacagcccatactgcaccggcggcagcggcagcaacagcagcggccacacagaagcaaaggcgaccggatagcaagactctgacaaagcccaagaaatccacagcggcggcagcagcaggaggaggagcgctgcgtctggcgcccaacgaacccgtatcgacccgcgagcttagaaacaggatttttcccactctgtatgctatatttcaacagagcaggggccaagaacaagagctgaaaataaaaaacaggtctctgcgatccctcacccgcagctgcctgtatcacaaaagcgaagatcagcttcggcgcacgctggaagacgcggaggctctcttcagtaaatactgcgcgctgactcttaaggactagtttcgcgccctttctcaaatttaagcgcgaaaactacgtcatctccagcggccacacccggcgccagcacctgttgtcagcgccattttttagggcggagtaacttgtatgtgttgggaattgtagttttcttaaaatgggaagtgacgtaacgtgggaaaacggaagtgacgatttgaggaagttgtgggttttttggctttcgtttctgggcgtaggttcgcgtgcggttttctgggtgttttttgtggactttaaccgttacgtcattttttagtcctatatatactcgctctgcacttggcccttttttacactgtgactgattgagctggtgccgtgtcgagtggtgtttttttaataggttttcttttttactggtaaggctgactgttatgactacgtccggcgttccatttggcatgacactacgaccaacacgatctcggttgtctcggcgcactccgtacagtagggatcgtctacctccttttgagacagaaacccgcgctaccatactggaggatcatccgctgctgcccgaatgtaacactttgacaatgcacaacgtgagttacgtgcgaggtcttccctgcagtgtgggatttacgctgattcaggaatgggttgttccctgggatatggttctaacgcgggaggagcttgtaatcctgaggaagtgtatgcacgtgtgcctgtgttgtgccaacattgatatcatgacgagcatgatgatccatggttacgagtcctgggctctccactgtcattgttccagtcccggttccctgcagtgtatagccggcgggcaggttttggccagctggtttaggatggtggtggatggcgccatgtttaatcagaggtttatatggtaccgggaggtggtgaattacaacatgccaaaagaggtaatgtttatgtccagcgtgtttatgaggggtcgccacttaatctacctgcgcttgtggtatgatggccacgtgggttctgtggtccccgccatgagctttggatacagcgccttgcactgtgggattttgaacaatattgtggtgctgtgctgcagttactgtgctgatttaagtgagatcagggtgcgctgctgtgcccggaggacaaggcgccttatgctgcgggcggtgcgaatcatcgctgaggagaccactgccatgttgtattcctgcaggacggagcggcggcggcagcagtttattcgcgcgctgctgcagcaccaccgccctatcctgatgcacgattatgactctacccccatgtaggcgtggacttctccttcgccgcccgttaagcaaccgcaagttggacagcagcctgtggctcagcagctggacagcgacatgaacttaagtgagctgcccggggagtttattaatatcactgatgagcgtttggctcgacaggaaaccgtgtggaatataacacctaagaatatgtctgttacccatgatatgatgctttttaaggccagccggggagaaaggactgtgtactctgtgtgttgggagggaggtggcaggttgaatactagggttctgtgagtttgattaaggtacggtgatctgtataagctatgtggtggtggggctatactactgaatgaaaaatgacttgaaattttctgcaattgaaaaataaacacgttgaaacataacacaaacgattctttattcttgggcaatgtatgaaaaagtgtaagaggatgtggcaaatatttcattaatgtagttgtggccagaccagtcccatgaaaatgacatagagtatgcacttggagttgtgtctcctgtttcctgtgtaccgtttagtgtaatggttagtgttacaggtttagttttgtctccgtttaagtaaacttgactgacaatgttacttttggcagttttaccgtgagattttggataagctgataggttaggcataaatccaacagcgtttgtataggctgtcgcccctcctgacgcggtaggaggaggggagggtgccctgcatgtctgccgctgctcttgctcttgccgctgctgaggaggggggcgcatctgccgcagcaccggatgcatctgggaaaagcaaaaaaggggctcgtccctgtttccggaggaatttgcaagcggggtcttgcatgacggggaggcaaacccccgttcgccgcagtccggccggtccgagactcgaaccgggggtcccgcgactcaacccttggaaaataaccctccggctacagggagcgagccacttaatgctttcgctttccagcctaaccgcttacgctgcgcgcggccagtggccaaaaaagctagcgcagcagccgccgcgcctggaaggaagccaaaaggagcactcccccgttgtctgacgtcgcacacctgggttcgacacgcgggcggtaaccgcatggatcacggcggacggccggatacggggctcgaaccccggtcgtccgccatgatacccttgcgaatttatccaccagaccacggaagagtgcccgcttacaggctctccttttgcacggtctagagcgtcaacgattgcgcgcgcctgaccggccagagcgtcccgaccatggagcactttttgccgctgcgcaacatctggaaccgcgtccgcgactttccgcgcgcctccaccaccgccgccggcatcacctggatgtccaggtacatctacggatatggcaaacagctattatgggtattatgggtgcggccgcggatcccgggcccgtcgactgcagaggcctgcatgcaagcttggtgtaatcatggtcatagctgtttcctgtgtgaaattgttatccgctcacaattccacacaacatacgagccggaagcataaagtgtaaagcctggggtgcctaatgagtgagctaactcacattaattgcgttgcgctcactgcccgctttccagtcgggaaacctgtcgtgccagctgcattaatgaatcggccaacgcgcggggagaggcggtttgcgtattgggcgctcttccgcttcctcgctcactgactcgctgcgctcggtcgttcggctgcggcgagcggtatcagctcactcaaaggcggtaatacggttatccacagaatcaggggataacgcaggaaagaacatgtgagcaaaaggccagcaaaaggccaggaaccgtaaaaaggccgcgttgctggcgtttttccataggctccgcccccctgacgagcatcacaaaaatcgacgctcaagtcagaggtggcgaaacccgacaggactataaagataccaggcgtttccccctggaagctccctcgtgcgctctcctgttccgaccctgccgcttaccggatacctgtccgcctttctcccttcgggaagcgtggcgctttctcatagctcacgctgtaggtatctcagttcggtgtaggtcgttcgctccaagctgggctgtgtgcacgaaccccccgttcagcccgaccgctgcgccttatccggtaactatcgtcttgagtccaacccggtaagacacgacttatcgccactggcagcagccactggtaacaggattagcagagcgaggtatgtaggcggtgctacagagttcttgaagtggtggcctaactacggctacactagaagaacagtatttggtatctgcgctctgctgaagccagttaccttcggaaaaagagttggtagctcttgatccggcaaacaaaccaccgctggtagcggtggtttttttgtttgcaagcagcagattacgcgcagaaaaaaaggatctcaagaagatcctttgatcttttctacggggtctgacgctcagtggaacgaaaactcacgttaagggattttggtcatgagattatcaaaaaggatcttcacctagaaggtcctgtattagaggtcacgtgagtgttttgcgacattttgcgacaccatgtggtcacgctgggtatttaagcccgagtgagcacgcagggtctccattttgaagcgggaggtttgaacgcgcagccgccatccttttaaattaaaaatgaagttttaaatcaagcccaatctgaataatgttacaaccaattaaccaattctgattagaaaaactcatcgagcatcaaatgaaactgcaatttattcatatcaggattatcaataccatatttttgaaaaagccgtttctgtaatgaaggagaaaactcaccgaggcagttccataggatggcaagatcctggtatcggtctgcgattccgactcgtccaacatcaatacaacctattaatttcccctcgtcaaaaataaggttatcaagtgagaaatcaccatgagtgacgactgaatccggtgagaatggcaaaagtttatgcatttctttccagacttgttcaacaggccagccattacgctcgtcatcaaaatcactcgcatcaaccaaaccgttattcattcgtgattgcgcctgagcgagacgaaatacgcgatcgctgttaaaaggacaattacaaacaggaatcgaatgcaaccggcgcaggaacactgccagcgcatcaacaatattttcacctgaatcaggatattcttctaatacctggaatgctgtttttccggggatcgcagtggtgagtaaccatgcatcatcaggagtacggataaaatgcttgatggtcggaagaggcataaattccgtcagccagtttagtctgaccatctcatctgtaacatcattggcaacgctacctttgccatgtttcagaaacaactctggcgcatcgggcttcccatacaagcgatagattgtcgcacctgattgcccgacattatcgcgagcccatttatacccatataaatcagcatccatgttggaatttaatcgcggcctcgacgtttcccgttgaatatggctcataacaccccttgtattactgtttatgtaagcagacagttttattgttcatgatgatatatttttatcttgtgcaatgtaacatcagagattttgagacacgggccagagctgca

SEQ ID NO: 180 - DNA, 5505 bp, synthetic construct; identical to SEQ ID NO: 25
  source 1..5505: mol_type = other DNA

SEQ ID NO: 181 - DNA, 2208 bp, synthetic construct
  source 1..2208: mol_type = other DNA
atggctgccgatggttatcttccagattggctcgaggacactctctctgaaggaataagacagtggtggaagctcaaacctggcccaccaccaccaaagcccgcagagcggcataaggacgacagcaggggtcttgtgcttcctgggtacaagtacctcggacccttcaacggactcgacaagggagagccggtcaacgaggcagacgccgcggccctcgagcacgacaaagcctacgaccggcagctcgacagcggagacaacccgtacctcaagtacaaccacgccgacgcggagtttcaggagcgccttaaagaagatacgtcttttgggggcaacctcggacgagcagtcttccaggcgaaaaagagggttctagaacctctgggcctggttgaggaacctgttaagacggctccgggaaaaaagaggccggtagagcactctcctgtggagccagactcctcctcgggaaccggaaaggcgggccagcagcctgcaagaaaaagattgaattttggtcagactggagacgcagactcagtacctgacccccagcctctcggacagccaccagcagccccctctggtctgggaactaatacgatggctacaggcagtggcgcaccaatggcagacaataacgagggcgccgacggagtgggtaattcctcgggaaattggcattgcgattccacatggatgggcgacagagtcatcaccaccagcacccgaacctgggccctgcccacctacaacaaccacctctacaaacaaatttccagccaatcaggagcctcgaacgacaatcactactttggctacagcaccccttgggggtattttgacttcaacagattccactgccacttttcaccacgtgactggcaaagactcatcaacaacaactggggattccgacccaagagactcaacttcaagctctttaacattcaagtcaaagaggtcacgcagaatgacggtacgacgacgattgccaataaccttaccagcacggttcaggtgtttactgactcggagtaccagctcccgtacgtcctcggctcggcgcatcaaggatgcctcccgccgttcccagcagacgtcttcatggtgccacagtatggatacctcaccctgaacaacgggagtcaggcagtaggacgctcttcattttactgcctggagtactttccttctcagatgctgcgtaccggaaacaactttaccttcagctacacttttgaggacgttcctttccacagcagctacgctcacagccagagtctggaccgtctcatgaatcctctcatcgaccagtacctgtattacttgagcagaacaaacactccaagtggaaccaccacgcagtcaaggcttcagttttctcaggccggagcgagtgacattcgggaccagtctaggaactggcttcctggaccctgttaccgccagcagcgagtatcaaagacatctgcggataacaacaacagtgaatactcgtggactggagctaccaagtaccacctcaatggcagagactctctggtgaatccgggcccggccatggcaagccacaaggacgatgaagaaaagttttttcctcagagcggggttctcatctttgggaagcaaggctcagagaaaacaaatgtggacattgaaaaggtcatgattacagacgaagaggaaatcaggacaaccaatcccgtggctacggagcagtatggttctgtatctaccaacctccagagaggcaacagacaagcagctaccgcagatgtcaacacacaaggcgttcttccaggcatggtctggcaggacagagatgtgtaccttcaggggcccatctgggcaaagattccacacacggacggacattttcacccctctcccctcatgggtggattcggacttaaacaccctcctccacagattctcatcaagaacaccccggtacctgcgaatccttcgaccaccttcagtgcggcaaagtttgcttccttcatcacacagtactccacgggacaggtcagcgtggagatcgagtgggagctgcagaaggaaaacagcaaacgctggaatcccgaaattcagtacacttccaactacaacaagtctgttaatgtggactttactgtggacactaatggcgtgtattcagagcctcgccccattggcaccagatacctgactcgtaatctgtaa

SEQ ID NO: 182 - DNA, 4090 bp, synthetic construct
  source 1..4090: mol_type = other DNA
atgccggggttttacgagattgtgattaaggtccccagcgaccttgacgagcatctgcccggcatttctgacagctttgtgaactgggtggccgagaaggaatgggagttgccgccagattctgacatggatctgaatctgattgagcaggcacccctgaccgtggccgagaagctgcagcgcgactttctgacggaatggcgccgtgtgagtaaggccccggaggctcttttctttgtgcaatttgagaagggagagagctacttccacatgcacgtgctcgtggaaaccaccggggtgaaatccatggttttgggacgtttcctgagtcagattcgcgaaaaactgattcagagaatttaccgcgggatcgagccgactttgccaaactggttcgcggtcacaaagaccagaaatggcgccggaggcgggaacaaggtggtggatgagtgctacatccccaattacttgctccccaaaacccagcctgagctccagtgggcgtggactaatatggaacagtatttaagcgcctgtttgaatctcacggagcgtaaacggttggtggcgcagcatctgacgcacgtgtcgcagacgcaggagcagaacaaagagaatcagaatcccaattctgatgcgccggtgatcagatcaaaaacttcagccaggtacatggagctggtcgggtggctcgtggacaaggggattacctcggagaagcagtggatccaggaggaccaggcctcatacatctccttcaatgcggcctccaactcgcggtcccaaatcaaggctgccttggacaatgcgggaaagattatgagcctgactaaaaccgcccccgactacctggtgggccagcagcccgtggaggacatttccagcaatcggatttataaaattttggaactaaacgggtacgatccccaatatgcggcttccgtctttctgggatgggccacgaaaaagttcggcaagaggaacaccatctggctgtttgggcctgcaactaccgggaagaccaacatcgcggaggccatagcccacactgtgcccttctacgggtgcgtaaactggaccaatgagaactttcccttcaacgactgtgtcgacaagatggtgatctggtgggaggaggggaagatgaccgccaaggtcgtggagtcggccaaagccattctcggaggaagcaaggtgcgcgtggaccagaaatgcaagtcctcggcccagatagacccgactcccgtgatcgtcacctccaacaccaacatgtgcgccgtgattgacgggaactcaacgaccttcgaacaccagcagccgttgcaagaccggatgttcaaatttgaactcacccgccgtctggatcatgactttgggaaggtcaccaagcaggaagtcaaagactttttccggtgggcaaaggatcacgtggttgaggtggagcatgaattctacgtcaaaaagggtggagccaagaaaagacccgcccccagtgacgcagatataagtgagcccaaacgggtgcgcgagtcagttgcgcagccatcgacgtcagacgcggaagcttcgatcaactacgcagacaggtaccaaaacaaatgttctcgtcacgtgggcatgaatctgatgctgtttccctgcagacaatgcgagagaatgaatcagaattcaaatatctgcttcactcacggacagaaagactgtttagagtgctttcccgtgtcagaatctcaacccgtttctgtcgtcaaaaaggcgtatcagaaactgtgctacattcatcatatcatgggaaaggtgccagacgcttgcactgcctgcgatctggtcaatgtggatttggatgactgcatctttgaacaataaatgatttaaatcaggtatggctgccgatggttatcttccagattggctcgaggacactctctctgaaggaataagacagtggtggaagctcaaacctggcccaccaccaccaaagcccgcagagcggcataaggacgacagcaggggtcttgtgcttcctgggtacaagtacctcggacccttcaacggactcgacaagggagagccggtcaacgaggcagacgccgcggccctcgagcacgacaaagcctacgaccggcagctcgacagcggagacaacccgtacctcaagtacaaccacgccgacgcggagtttcaggagcgccttaaagaagatacgtcttttgggggcaacctcggacgagcagtcttccaggcgaaaaagagggttctagaacctctgggcctggttgaggaacctgttaagacggctccgggaaaaaagaggccggtagagcactctcctgtggagccagactcctcctcgggaaccggaaaggcgggccagcagcctgcaagaaaaagattgaattttggtcagactggagacgcagactcagtacctgacccccagcctctcggacagccaccagcagccccctctggtctgggaactaatacgatggctacaggcagtggcgcaccaatggcagacaataacgagggcgccgacggagtgggtaattcctcgggaaattggcattgcgattccacatggatgggcgacagagtcatcaccaccagcacccgaacctgggccctgcccacctacaacaaccacctctacaaacaaatttccagccaatcaggagcctcgaacgacaatcactactttggctacagcaccccttgggggtattttgacttcaacagattccactgccacttttcaccacgtgactggcaaagactcatcaacaacaactggggattccgacccaagagactcaacttcaagctctttaacattcaagtcaaagaggtcacgcagaatgacggtacgacgacgattgccaataaccttaccagcacggttcaggtgtttactgactcggagtaccagctcccgtacgtcctcggctcggcgcatcaaggatgcctcccgccgttcccagcagacgtcttcatggtgccacagtatggatacctcaccctgaacaacgggagtcaggcagtaggacgctcttcattttactgcctggagtactttccttctcagatgctgcgtaccggaaacaactttaccttcagctacacttttgaggacgttcctttccacagcagctacgctcacagccagagtctggaccgtctcatgaatcctctcatcgaccagtacctgtattacttgagcagaacaaacactccaagtggaaccaccacgcagtcaaggcttcagttttctcaggccggagcgagtgacattcgggaccagtctaggaactggcttcctggaccctgttaccgccagcagcgagtatcaaagacatctgcggataacaacaacagtgaatactcgtggactggagctaccaagtaccacctcaatggcagagactctctggtgaatccgggcccggccatggcaagccacaaggacgatgaagaaaagttttttcctcagagcggggttctcatctttgggaagcaaggctcagagaaaacaaatgtggacattgaaaaggtcatgattacagacgaagaggaaatcaggacaaccaatcccgtggctacggagcagtatggttctgtatctaccaacctccagagaggcaacagacaagcagctaccgcagatgtcaacacacaaggcgttcttccaggcatggtctggcaggacagagatgtgtaccttcaggggcccatctgggcaaagattccacacacggacggacattttcacccctctcccctcatgggtggattcggacttaaacaccctcctccacagattctcatcaagaacaccccggtacctgcgaatccttcgaccaccttcagtgcggcaaagtttgcttccttcatcacacagtactccacgggacaggtcagcgtggagatcgagtgggagctgcagaaggaaaacagcaaacgctggaatcccgaaattcagtacacttccaactacaacaagtctgttaatgtggactttactgtggacactaatggcgtgtattcagagcctcgccccattggcaccagatacctgactcgtaatctgtaa

SEQ ID NO: 183 - DNA, 9816 bp, synthetic construct
  source 1..9816: mol_type = other DNA
atgccggggttttacgagattgtgattaaggtccccagcgaccttgacgagcatctgcccggcatttctgacagctttgtgaactgggtggccgagaaggaatgggagttgccgccagattctgacatggatctgaatctgattgagcaggcacccctgaccgtggccgagaagctgcagcgcgactttctgacggaatggcgccgtgtgagtaaggccccggaggctcttttctttgtgcaatttgagaagggagagagctacttccacatgcacgtgctcgtggaaaccaccggggtgaaatccatggttttgggacgtttcctgagtcagattcgcgaaaaactgattcagagaatttaccgcgggatcgagccgactttgccaaactggttcgcggtcacaaagaccagaaatggcgccggaggcgggaacaaggtggtggatgagtgctacatccccaattacttgctccccaaaacccagcctgagctccagtgggcgtggactaatatggaacagtatttaagcgcctgtttgaatctcacggagcgtaaacggttggtggcgcagcatctgacgcacgtgtcgcagacgcaggagcagaacaaagagaatcagaatcccaattctgatgcgccggtgatcagatcaaaaacttcagccaggtacatggagctggtcgggtggctcgtggacaaggggattacctcggagaagcagtggatccaggaggaccaggcctcatacatctccttcaatgcggcctccaactcgcggtcccaaatcaaggctgccttggacaatgcgggaaagattatgagcctgactaaaaccgcccccgactacctggtgggccagcagcccgtggaggacatttccagcaatcggatttataaaattttggaactaaacgggtacgatccccaatatgcggcttccgtctttctgggatgggccacgaaaaagttcggcaagaggaacaccatctggctgtttgggcctgcaactaccgggaagaccaacatcgcggaggccatagcccacactgtgcccttctacgggtgcgtaaactggaccaatgagaactttcccttcaacgactgtgtcgacaagatggtgatctggtgggaggaggggaagatgaccgccaaggtcgtggagtcggccaaagccattctcggaggaagcaaggtgcgcgtggaccagaaatgcaagtcctcggcccagatagacccgactcccgtgatcgtcacctccaacaccaacatgtgcgccgtgattgacgggaactcaacgaccttcgaacaccagcagccgttgcaagaccggatgttcaaatttgaactcacccgccgtctggatcatgactttgggaaggtcaccaagcaggaagtcaaagactttttccggtgggcaaaggatcacgtggttgaggtggagcatgaattctacgtcaaaaagggtggagccaagaaaagacccgcccccagtgacgcagatataagtgagcccaaacgggtgcgcgagtcagttgcgcagccatcgacgtcagacgcggaagcttcgatcaactacgcagacaggtaccaaaacaaatgttctcgtcacgtgggcatgaatctgatgctgtttccctgcagacaatgcgagagaatgaatcagaattcaaatatctgcttcactcacggacagaaagactgtttagagtgctttcccgtgtcagaatctcaacccgtttctgtcgtcaaaaaggcgtatcagaaactgtgctacattcatcatatcatgggaaaggtgccagacgcttgcactgcctgcgatctggtcaatgtggatttggatgactgcatctttgaacaataaatgatttaaatcaggtatggctgccgatggttatcttccagattggctcgaggacactctctctgaaggaataagacagtggtggaagctcaaacctggcccaccaccaccaaagcccgcagagcggcataaggacgacagcaggggtcttgtgcttcctgggtacaagtacctcggacccttcaacggactcgacaagggagagccggtcaacgaggcagacgccgcggccctcgagcacgacaaagcctacgaccggcagctcgacagcggagacaacccgtacctcaagtacaaccacgccgacgcggagtttcaggagcgccttaaagaagatacgtcttttgggggcaacctcggacgagcagtcttccaggcgaaaaagagggttctagaacctctgggcctggttgaggaacctgttaagacggctccgggaaaaaagaggccggtagagcactctcctgtggagccagactcctcctcgggaaccggaaaggcgggccagcagcctgcaagaaaaagattgaattttggtcagactggagacgcagactcagtacctgacccccagcctctcggacagccaccagcagccccctctggtctgggaactaatacgatggctacaggcagtggcgcaccaatggcagacaataacgagggcgccgacggagtgggtaattcctcgggaaattggcattgcgattccacatggatgggcgacagagtcatcaccaccagcacccgaacctgggccctgcccacctacaacaaccacctctacaaacaaatttccagccaatcaggagcctcgaacgacaatcactactttggctacagcaccccttgggggtattttgacttcaacagattccactgccacttttcaccacgtgactggcaaagactcatcaacaacaactggggattccgacccaagagactcaacttcaagctctttaacattcaagtcaaagaggtcacgcagaatgacggtacgacgacgattgccaataaccttaccagcacggttcaggtgtttactgactcggagtaccagctcccgtacgtcctcggctcggcgcatcaaggatgcctcccgccgttcccagcagacgtcttcatggtgccacagtatggatacctcaccctgaacaacgggagtcaggcagtaggacgctcttcattttactgcctggagtactttccttctcagatgctgcgtaccggaaacaactttaccttcagctacacttttgaggacgttcctttccacagcagctacgctcacagccagagtctggaccgtctcatgaatcctctcatcgaccagtacctgtattacttgagcagaacaaacactccaagtggaaccaccacgcagtcaaggcttcagttttctcaggccggagcgagtgacattcgggaccagtctaggaactggcttcctggaccctgttaccgccagcagcgagtatcaaagacatctgcggataacaacaacagtgaatactcgtggactggagctaccaagtaccacctcaatggcagagactctctggtgaatccgggcccggccatggcaagccacaaggacgatgaagaaaagttttttcctcagagcggggttctcatctttgggaagcaaggctcagagaaaacaaatgtggacattgaaaaggtcatgattacagacgaagaggaaatcaggacaaccaatcccgtggctacggagcagtatggttctgtatctaccaacctccagagaggcaacagacaagcagctaccgcagatgtcaacacacaaggcgttcttccaggcatggtctggcaggacagagatgtgtaccttcaggggcccatctgggcaaagattccacacacggacggacattttcacccctctcccctcatgggtggattcggacttaaacaccctcctccacagattctcatcaagaacaccccggtacctgcgaatccttcgaccaccttcagtgcggcaaagtttgcttccttcatcacacagtactccacgggacaggtcagcgtggagatcgagtgggagctgcagaaggaaaacagcaaacgctggaatcccgaaattcagtacacttccaactacaacaagtctgttaatgtggactttactgtggacactaatggcgtgtattcagagcctcgccccattggcaccagatacctgactcgtaatctgtaattgcctgttaatcaataaaccggttgattcgtttcagttgaactttggtctctgcgaagggcgaattcgtttaaacctgcaggactagagccgaattctgcatcgcgatagggataacagggtaataaataatgtactagagacactttcaataaaggcaaatgcttttatttgtacactctcgggtgattatttacccccacccttgccgtctgcgccgtttaaaaatcaaaggggttctgccgcgcatcgctatgcgccactggcagggacacgttgcgatactggtgtttagtgctccacttaaactcaggcacaaccatccgcggcagctcggtgaagttttcactccacaggctgcgcaccatcaccaacgcgtttagcaggtcgggcgccgatatcttgaagtcgcagttggggcctccgccctgcgcgcgcgagttgcgatacacagggttgcagcactggaacactatcagcgccgggtggtgcacgctggccagcacgctcttgtcggagatcagatccgcgtccaggtcctccgcgttgctcagggcgaacggagtcaactttggtagctgccttcccaaaaagggcgcgtgcccaggctttgagttgcactcgcaccgtagtggcatcaaaaggtgaccgtgcccggtctgggcgttaggatacagcgcctgcataaaagccttgatctgcttaaaagccacctgagcctttgcgccttcagagaagaacatgccgcaagacttgccggaaaactgattggccggacaggccgcgtcgtgcacgcagcaccttgcgtcggtgttggagatctgcaccacatttcggccccaccggttcttcacgatcttggccttgctagactgctccttcagcgcgcgctgcccgttttcgctcgtcacatccatttcaatcacgtgctccttatttatcataatgcttccgtgtagacacttaagctcgccttcgatctcagcgcagcggtgcagccacaacgcgcagcccgtgggctcgtgatgcttgtaggtcacctctgcaaacgactgcaggtacgcctgcaggaatcgccccatcatcgtcacaaaggtcttgttgctggtgaaggtcagctgcaacccgcggtgctcctcgttcagccaggtcttgcatacggccgccagagcttccacttggtcaggcagtagtttgaagttcgcctttagatcgttatccacgtggtacttgtccatcagcgcgcgcgcagcctccatgcccttctcccacgcagacacgatcggcacactcagcgggttcatcaccgtaatttcactttccgcttcgctgggctcttcctcttcctcttgcgtccgcataccacgcgccactgggtcgtcttcattcagccgccgcactgtgcgcttacctcctttgccatgcttgattagcaccggtgggttgctgaaacccaccatttgtagcgccacatcttctctttcttcctcgctgtccacgattacctctggtgatggcgggcgctcgggcttgggagaagggcgcttctttttcttcttgggcgcaatggccaaatccgccgccgaggtcgatggccgcgggctgggtgtgcgcggcaccagcgcgtcttgtgatgagtcttcctcgtcctcggactcgatacgccgcctcatccgcttttttgggggcgcccggggaggcggcggcgacggggacggggacgacacgtcctccatggttgggggacgtcgcgccgcaccgcgtccgcgctcgggggtggtttcgcgctgctcctcttcccgactggccatttccttctcctataggcagaaaaagatcgttgaaactcactccggggctgtggacgtcggcttaccttcgcaaatttgtacctgaggactaccacgcccacgagattaggttctacgaagaccaatcccgcccgcctaatgcggagcttaccgcctgcgtcattacccagggccacattcttggccaattgcaagccatcaacaaagcccgccaagagtttctgctacgaaagggacggggggtttacttggacccccagtccggcgaggagctcaacccaatccccccgccgccgcagccctatcagcagcagccgcgggcccttgcttcccaggatggcacccaaaaagaagctgcagctgccgccgccacccacggacgaggaggaatactgggacagtcaggcagaggaggttttggacgaggaggaggaggacatgatggaagactgggagagcctagacgaggaagcttccgaggtcgaagaggtgtcagacgaaacaccgtcaccctcggtcgcattcccctcgccggcgccccagaaatcggcaaccggttccagcatggctacaacctccgctcctcaggcgccgccggcactgcccgttcgccgacccaaccgtagatgggacaccactggaaccagggccggtaagtccaagcagccgccgccgttagcccaagagcaacaacagcgccaaggctaccgctcatggcgcgggcacaagaacgccatagttgcttgcttgcaagactgtgggggcaacatctccttcgcccgccgctttcttctctaccatcacggcgtggccttcccccgtaacatcctgcattactaccgtcatctctacagcccatactgcaccggcggcagcggcagcaacagcagcggccacacagaagcaaaggcgaccggatagcaagactctgacaaagcccaagaaatccacagcggcggcagcagcaggaggaggagcgctgcgtctggcgcccaacgaacccgtatcgacccgcgagcttagaaacaggatttttcccactctgtatgctatatttcaacagagcaggggccaagaacaagagctgaaaataaaaaacaggtctctgcgatccctcacccgcagctgcctgtatcacaaaagcgaagatcagcttcggcgcacgctggaagacgcggaggctctcttcagtaaatactgcgcgctgactcttaaggactagtttcgcgccctttctcaaatttaagcgcgaaaactacgtcatctccagcggccacacccggcgccagcacctgttgtcagcgccattttttagggcggagtaacttgtatgtgttgggaattgtagttttcttaaaatgggaagtgacgtaacgtgggaaaacggaagtgacgatttgaggaagttgtgggttttttggctttcgtttctgggcgtaggttcgcgtgcggttttctgggtgttttttgtggactttaaccgttacgtcattttttagtcctatatatactcgctctgcacttggcccttttttacactgtgactgattgagctggtgccgtgtcgagtggtgtttttttaataggttttcttttttactggtaaggctgactgttatgactacgtccggcgttccatttggcatgacactacgaccaacacgatctcggttgtctcggcgcactccgtacagtagggatcgtctacctccttttgagacagaaacccgcgctaccatactggaggatcatccgctgctgcccgaatgtaacactttgacaatgcacaacgtgagttacgtgcgaggtcttccctgcagtgtgggatttacgctgattcaggaatgggttgttccctgggatatggttctaacgcgggaggagcttgtaatcctgaggaagtgtatgcacgtgtgcctgtgttgtgccaacattgatatcatgacgagcatgatgatccatggttacgagtcctgggctctccactgtcattgttccagtcccggttccctgcagtgtatagccggcgggcaggttttggccagctggtttaggatggtggtggatggcgccatgtttaatcagaggtttatatggtaccgggaggtggtgaattacaacatgccaaaagaggtaatgtttatgtccagcgtgtttatgaggggtcgccacttaatctacctgcgcttgtggtatgatggccacgtgggttctgtggtccccgccatgagctttggatacagcgccttgcactgtgggattttgaacaatattgtggtgctgtgctgcagttactgtgctgatttaagtgagatcagggtgcgctgctgtgcccggaggacaaggcgccttatgctgcgggcggtgcgaatcatcgctgaggagaccactgccatgttgtattcctgcaggacggagcggcggcggcagcagtttattcgcgcgctgctgcagcaccaccgccctatcctgatgcacgattatgactctacccccatgtaggcgtggacttctccttcgccgcccgttaagcaaccgcaagttggacagcagcctgtggctcagcagctggacagcgacatgaacttaagtgagctgcccggggagtttattaatatcactgatgagcgtttggctcgacaggaaaccgtgtggaatataacacctaagaatatgtctgttacccatgatatgatgctttttaaggccagccggggagaaaggactgtgtactctgtgtgttgggagggaggtggcaggttgaatactagggttctgtgagtttgattaaggtacggtgatctgtataagctatgtggtggtggggctatactactgaatgaaaaatgacttgaaattttctgcaattgaaaaataaacacgttgaaacataacacaaacgattctttattcttgggcaatgtatgaaaaagtgtaagaggatgtggcaaatatttcattaatgtagttgtggccagaccagtcccatgaaaatgacatagagtatgcacttggagttgtgtctcctgtttcctgtgtaccgtttagtgtaatggttagtgttacaggtttagttttgtctccgtttaagtaaacttgactgacaatgttacttttggcagttttaccgtgagattttggataagctgataggttaggcataaatccaacagcgtttgtataggctgtcgcccctcctgacgcggtaggaggaggggagggtgccctgcatgtctgccgctgctcttgctcttgccgctgctgaggaggggggcgcatctgccgcagcaccggatgcatctgggaaaagcaaaaaaggggctcgtccctgtttccggaggaatttgcaagcggggtcttgcatgacggggaggcaaacccccgttcgccgcagtccggccggtccgagactcgaaccgggggtcccgcgactcaacccttggaaaataaccctccggctacagggagcgagccacttaatgctttcgctttccagcctaaccgcttacgctgcgcgcggccagtggccaaaaaagctagcgcagcagccgccgcgcctggaaggaagccaaaaggagcactcccccgttgtctgacgtcgcacacctgggttcgacacgcgggcggtaaccgcatggatcacggcggacggccggatacggggctcgaaccccggtcgtccgccatgatacccttgcgaatttatccaccagaccacggaagagtgcccgcttacaggctctccttttgcacggtctagagcgtcaacgattgcgcgcgcctgaccggccagagcgtcccgaccatggagcactttttgccgctgcgcaacatctggaaccgcgtccgcgactttccgcgcgcctccaccaccgccgccggcatcacctggatgtccaggtacatctacggata

SEQ ID NO: 184 - DNA, 12579 bp, synthetic construct
  source 1..12579: mol_type = other DNA
tcgcgcgtttcggtgatgacggtgaaaacctctgacacatgcagctcccggagacggtcacagcttgtctgtaagcggatgccgggagcagacaagcccgtcagggcgcgtcagcgggtgttggcgggtgtcggggctggcttaactatgcggcatcagagcagattgtactgagagtgcaccatatgcggtgtgaaataccgcacagatgcgtaaggagaaaataccgcatcaggcgccattcgccattcaggctgcgcaactgttgggaagggcgatcggtgcgggcctcttcgctattacgccagctggcgaaagggggatgtgctgcaaggcgattaagttgggtaacgccagggttttcccagtcacgacgttgtaaaacgacggccagagaattccgcagggtctccattttgaagcgggaggtttgaacgcgcagccgccatgccggggttttacgagattgtgattaaggtccccagcgaccttgacgagcatctgcccggcatttctgacagctttgtgaactgggtggccgagaaggaatgggagttgccgccagattctgacatggatctgaatctgattgagcaggcacccctgaccgtggccgagaagctgcagcgcgactttctgacggaatggcgccgtgtgagtaaggccccggaggctcttttctttgtgcaatttgagaagggagagagctacttccacatgcacgtgctcgtggaaaccaccggggtgaaatccatggttttgggacgtttcctgagtcagattcgcgaaaaactgattcagagaatttaccgcgggatcgagccgactttgccaaactggttcgcggtcacaaagaccagaaatggcgccggaggcgggaacaaggtggtggatgagtgctacatccccaattacttgctccccaaaacccagcctgagctccagtgggcgtggactaatatggaacagtatttaagcgcctgtttgaatctcacggagcgtaaacggttggtggcgcagcatctgacgcacgtgtcgcagacgcaggagcagaacaaagagaatcagaatcccaattctgatgcgccggtgatcagatcaaaaacttcagccaggtacatggagctggtcgggtggctcgtggacaaggggattacctcggagaagcagtggatccaggaggaccaggcctcatacatctccttcaatgcggcctccaactcgcggtcccaaatcaaggctgccttggacaatgcgggaaagattatgagcctgactaaaaccgcccccgactacctggtgggccagcagcccgtggaggacatttccagcaatcggatttataaaattttggaactaaacgggtacgatccccaatatgcggcttccgtctttctgggatgggccacgaaaaagttcggcaagaggaacaccatctggctgtttgggcctgcaactaccgggaagaccaacatcgcggaggccatagcccacactgtgcccttctacgggtgcgtaaactggaccaatgagaactttcccttcaacgactgtgtcgacaagatggtgatctggtgggaggaggggaagatgaccgccaaggtcgtggagtcggccaaagccattctcggaggaagcaaggtgcgcgtggaccagaaatgcaagtcctcggcccagatagacccgactcccgtgatcgtcacctccaacaccaacatgtgcgccgtgattgacgggaactcaacgaccttcgaacaccagcagccgttgcaagaccggatgttcaaatttgaactcacccgccgtctggatcatgactttgggaaggtcaccaagcaggaagtcaaagactttttccggtgggcaaaggatcacgtggttgaggtggagcatgaattctacgtcaaaaagggtggagccaagaaaagacccgcccccagtgacgcagatataagtgagcccaaacgggtgcgcgagtcagttgcgcagccatcgacgtcagacgcggaagcttcgatcaactacgcagacaggtaccaaaacaaatgttctcgtcacgtgggcatgaatctgatgctgtttccctgcagacaatgcgagagaatgaatcagaattcaaatatctgcttcactcacggacagaaagactgtttagagtgctttcccgtgtcagaatctcaacccgtttctgtcgtcaaaaaggcgtatcagaaactgtgctacattcatcatatcatgggaaaggtgccagacgcttgcactgcctgcgatctggtcaatgtggatttggatgactgcatctttgaacaataaatgatttaaatcaggtatggctgccgatggttatcttccagattggctcgaggacactctctctgaaggaataagacagtggtggaagctcaaacctggcccaccaccaccaaagcccgcagagcggcataaggacgacagcaggggtcttgtgcttcctgggtacaagtacctcggacccttcaacggactcgacaagggagagccggtcaacgaggcagacgccgcggccctcgagcacgacaaagcctacgaccggcagctcgacagcggagacaacccgtacctcaagtacaaccacgccgacgcggagtttcaggagcgccttaaagaagatacgtcttttgggggcaacctcggacgagcagtcttccaggcgaaaaagagggttctagaacctctgggcctggttgaggaacctgttaagacggctccgggaaaaaagaggccggtagagcactctcctgtggagccagactcctcctcgggaaccggaaaggcgggccagcagcctgcaagaaaaagattgaattttggtcagactggagacgcagactcagtacctgacccccagcctctcggacagccaccagcagccccctctggtctgggaactaatacgatggctacaggcagtggcgcaccaatggcagacaataacgagggcgccgacggagtgggtaattcctcgggaaattggcattgcgattccacatggatgggcgacagagtcatcaccaccagcacccgaacctgggccctgcccacctacaacaaccacctctacaaacaaatttccagccaatcaggagcctcgaacgacaatcactactttggctacagcaccccttgggggtattttgacttcaacagattccactgccacttttcaccacgtgactggcaaagactcatcaacaacaactggggattccgacccaagagactcaacttcaagctctttaacattcaagtcaaagaggtcacgcagaatgacggtacgacgacgattgccaataaccttaccagcacggttcaggtgtttactgactcggagtaccagctcccgtacgtcctcggctcggcgcatcaaggatgcctcccgccgttcccagcagacgtcttcatggtgccacagtatggatacctcaccctgaacaacgggagtcaggcagtaggacgctcttcattttactgcctggagtactttccttctcagatgctgcgtaccggaaacaactttaccttcagctacacttttgaggacgttcctttccacagcagctacgctcacagccagagtctggaccgtctcatgaatcctctcatcgaccagtacctgtattacttgagcagaacaaacactccaagtggaaccaccacgcagtcaaggcttcagttttctcaggccggagcgagtgacattcgggaccagtctaggaactggcttcctggaccctgttaccgccagcagcgagtatcaaagacatctgcggataacaacaacagtgaatactcgtggactggagctaccaagtaccacctcaatggcagagactctctggtgaatccgggcccggccatggcaagccacaaggacgatgaagaaaagttttttcctcagagcggggttctcatctttgggaagcaaggctcagagaaaacaaatgtggacattgaaaaggtcatgattacagacgaagaggaaatcaggacaaccaatcccgtggctacggagcagtatggttctgtatctaccaacctccagagaggcaacagacaagcagctaccgcagatgtcaacacacaaggcgttcttccaggcatggtctggcaggacagagatgtgtaccttcaggggcccatctgggcaaagattccacacacggacggacattttcacccctctcccctcatgggtggattcggacttaaacaccctcctccacagattctcatcaagaacaccccggtacctgcgaatccttcgaccaccttcagtgcggcaaagtttgcttccttcatcacacagtactccacgggacaggtcagcgtggagatcgagtgggagctgcagaaggaaaacagcaaacgctggaatcccgaaattcagtacacttccaactacaacaagtctgttaatgtggactttactgtggacactaatggcgtgtattcagagcctcgccccattggcaccagatacctgactcgtaatctgtaattgcctgttaatcaataaaccggttgattcgtttcagttgaactttggtctctgcgaagggcgaattcgtttaaacctgcaggactagagccgaattctgcatcgcgatagggataacagggtaataaataatgtactagagacactttcaataaaggcaaatgcttttatttgtacactctcgggtgattatttacccccacccttgccgtctgcgccgtttaaaaatcaaaggggttctgccgcgcatcgctatgcgccactggcagggacacgttgcgatactggtgtttagtgctccacttaaactcaggcacaaccatccgcggcagctcggtgaagttttcactccacaggctgcgcaccatcaccaacgcgtttagcaggtcgggcgccgatatcttgaagtcgcagttggggcctccgccctgcgcgcgcgagttgcgatacacagggttgcagcactggaacactatcagcgccgggtggtgcacgctggccagcacgctcttgtcggagatcagatccgcgtccaggtcctccgcgttgctcagggcgaacggagtcaactttggtagctgccttcccaaaaagggcgcgtgcccaggctttgagttgcactcgcaccgtagtggcatcaaaaggtgaccgtgcccggtctgggcgttaggatacagcgcctgcataaaagccttgatctgcttaaaagccacctgagcctttgcgccttcagagaagaacatgccgcaagacttgccggaaaactgattggccggacaggccgcgtcgtgcacgcagcaccttgcgtcggtgttggagatctgcaccacatttcggccccaccggttcttcacgatcttggccttgctagactgctccttcagcgcgcgctgcccgttttcgctcgtcacatccatttcaatcacgtgctccttatttatcataatgcttccgtgtagacacttaagctcgccttcgatctcagcgcagcggtgcagccacaacgcgcagcccgtgggctcgtgatgcttgtaggtcacctctgcaaacgactgcaggtacgcctgcaggaatcgccccatcatcgtcacaaaggtcttgttgctggtgaaggtcagctgcaacccgcggtgctcctcgttcagccaggtcttgcatacggccgccagagcttccacttggtcaggcagtagtttgaagttcgcctttagatcgttatccacgtggtacttgtccatcagcgcgcgcgcagcctccatgcccttctcccacgcagacacgatcggcacactcagcgggttcatcaccgtaatttcactttccgcttcgctgggctcttcctcttcctcttgcgtccgcataccacgcgccactgggtcgtcttcattcagccgccgcactgtgcgcttacctcctttgccatgcttgattagcaccggtgggttgctgaaacccaccatttgtagcgccacatcttctctttcttcctcgctgtccacgattacctctggtgatggcgggcgctcgggcttgggagaagggcgcttctttttcttcttgggcgcaatggccaaatccgccgccgaggtcgatggccgcgggctgggtgtgcgcggcaccagcgcgtcttgtgatgagtcttcctcgtcctcggactcgatacgccgcctcatccgcttttttgggggcgcccggggaggcggcggcgacggggacggggacgacacgtcctccatggttgggggacgtcgcgccgcaccgcgtccgcgctcgggggtggtttcgcgctgctcctcttcccgactggccatttccttctcctataggcagaaaaagatcgttgaaactcactccggggctgtggacgtcggcttaccttcgcaaatttgtacctgaggactaccacgcccacgagattaggttctacgaagaccaatcccgcccgcctaatgcggagcttaccgcctgcgtcattacccagggccacattcttggccaattgcaagccatcaacaaagcccgccaagagtttctgctacgaaagggacggggggtttacttggacccccagtccggcgaggagctcaacccaatccccccgccgccgcagccctatcagcagcagccgcgggcccttgcttcccaggatggcacccaaaaagaagctgcagctgccgccgccacccacggacgaggaggaatactgggacagtcaggcagaggaggttttggacgaggaggaggaggacatgatggaagactgggagagcctagacgaggaagcttccgaggtcgaagaggtgtcagacgaaacaccgtcaccctcggtcgcattcccctcgccggcgccccagaaatcggcaaccggttccagcatggctacaacctccgctcctcaggcgccgccggcactgcccgttcgccgacccaaccgtagatgggacaccactggaaccagggccggtaagtccaagcagccgccgccgttagcccaagagcaacaacagcgccaaggctaccgctcatggcgcgggcacaagaacgccatagttgcttgcttgcaagactgtgggggcaacatctccttcgcccgccgctttcttctctaccatcacggcgtggccttcccccgtaacatcctgcattactaccgtcatctctacagcccatactgcaccggcggcagcggcagcaacagcagcggccacacagaagcaaaggcgaccggatagcaagactctgacaaagcccaagaaatccacagcggcggcagcagcaggaggaggagcgctgcgtctggcgcccaacgaacccgtatcgacccgcgagcttagaaacaggatttttcccactctgtatgctatatttcaacagagcaggggccaagaacaagagctgaaaataaaaaacaggtctctgcgatccctcacccgcagctgcctgtatcacaaaagcgaagatcagcttcggcgcacgctggaagacgcggaggctctcttcagtaaatactgcgcgctgactcttaaggactagtttcgcgccctttctcaaatttaagcgcgaaaactacgtcatctccagcggccacacccggcgccagcacctgttgtcagcgccattttttagggcggagtaacttgtatgtgttgggaattgtagttttcttaaaatgggaagtgacgtaacgtgggaaaacggaagtgacgatttgaggaagttgtgggttttttggctttcgtttctgggcgtaggttcgcgtgcggttttctgggtgttttttgtggactttaaccgttacgtcattttttagtcctatatatactcgctctgcacttggcccttttttacactgtgactgattgagctggtgccgtgtcgagtggtgtttttttaataggttttcttttttactggtaaggctgactgttatgactacgtccggcgttccatttggcatgacactacgaccaacacgatctcggttgtctcggcgcactccgtacagtagggatcgtctacctccttttgagacagaaacccgcgctaccatactggaggatcatccgctgctgcccgaatgtaacactttgacaatgcacaacgtgagttacgtgcgaggtcttccctgcagtgtgggatttacgctgattcaggaatgggttgttccctgggatatggttctaacgcgggaggagcttgtaatcctgaggaagtgtatgcacgtgtgcctgtgttgtgccaacattgatatcatgacgagcatgatgatccatggttacgagtcctgggctctccactgtcattgttccagtcccggttccctgcagtgtatagccggcgggcaggttttggccagctggtttaggatggtggtggatggcgccatgtttaatcagaggtttatatggtaccgggaggtggtgaattacaacatgccaaaagaggtaatgtttatgtccagcgtgtttatgaggggtcgccacttaatctacctgcgcttgtggtatgatggccacgtgggttctgtggtccccgccatgagctttggatacagcgccttgcactgtgggattttgaacaatattgtggtgctgtgctgcagttactgtgctgatttaagtgagatcagggtgcgctgctgtgcccggaggacaaggcgccttatgctgcgggcggtgcgaatcatcgctgaggagaccactgccatgttgtattcctgcaggacggagcggcggcggcagcagtttattcgcgcgctgctgcagcaccaccgccctatcctgatgcacgattatgactctacccccatgtaggcgtggacttctccttcgccgcccgttaagcaaccgcaagttggacagcagcctgtggctcagcagctggacagcgacatgaacttaagtgagctgcccggggagtttattaatatcactgatgagcgtttggctcgacaggaaaccgtgtggaatataacacctaagaatatgtctgttacccatgatatgatgctttttaaggccagccggggagaaaggactgtgtactctgtgtgttgggagggaggtggcaggttgaatactagggttctgtgagtttgattaaggtacggtgatctgtataagctatgtggtggtggggctatactactgaatgaaaaatgacttgaaattttctgcaattgaaaaataaacacgttgaaacataacacaaacgattctttattcttgggcaatgtatgaaaaagtgtaagaggatgtggcaaatatttcattaatgtagttgtggccagaccagtcccatgaaaatgacatagagtatgcacttggagttgtgtctcctgtttcctgtgtaccgtttagtgtaatggttagtgttacaggtttagttttgtctccgtttaagtaaacttgactgacaatgttacttttggcagttttaccgtgagattttggataagctgataggttaggcataaatccaacagcgtttgtataggctgtcgcccctcctgacgcggtaggaggaggggagggtgccctgcatgtctgccgctgctcttgctcttgccgctgctgaggaggggggcgcatctgccgcagcaccggatgcatctgggaaaagcaaaaaaggggctcgtccctgtttccggaggaatttgcaagcggggtcttgcatgacggggaggcaaacccccgttcgccgcagtccggccggtccgagactcgaaccgggggtcccgcgactcaacccttggaaaataaccctccggctacagggagcgagccacttaatgctttcgctttccagcctaaccgcttacgctgcgcgcggccagtggccaaaaaagctagcgcagcagccgccgcgcctggaaggaagccaaaaggagcactcccccgttgtctgacgtcgcacacctgggttcgacacgcgggcggtaaccgcatggatcacggcggacggccggatacggggctcgaaccccggtcgtccgccatgatacccttgcgaatttatccaccagaccacggaagagtgcccgcttacaggctctccttttgcacggtctagagcgtcaacgattgcgcgcgcctgaccggccagagcgtcccgaccatggagcactttttgccgctgcgcaacatctggaaccgcgtccgcgactttccgcgcgcctccaccaccgccgccggcatcacctggatgtccaggtacatctacggatatggcaaacagctattatgggtattatgggtgcggccgcggatcccgggcccgtcgactgcagaggcctgcatgcaagcttggtgtaatcatggtcatagctgtttcctgtgtgaaattgttatccgctcacaattccacacaacatacgagccggaagcataaagtgtaaagcctggggtgcctaatgagtgagctaactcacattaattgcgttgcgctcactgcccgctttccagtcgggaaacctgtcgtgccagctgcattaatgaatcggccaacgcgcggggagaggcggtttgcgtattgggcgctcttccgcttcctcgctcactgactcgctgcgctcggtcgttcggctgcggcgagcggtatcagctcactcaaaggcggtaatacggttatccacagaatcaggggataacgcaggaaagaacatgtgagcaaaaggccagcaaaaggccaggaaccgtaaaaaggccgcgttgctggcgtttttccataggctccgcccccctgacgagcatcacaaaaatcgacgctcaagtcagaggtggcgaaacccgacaggactataaagataccaggcgtttccccctggaagctccctcgtgcgctctcctgttccgaccctgccgcttaccggatacctgtccgcctttctcccttcgggaagcgtggcgctttctcatagctcacgctgtaggtatctcagttcggtgtaggtcgttcgctccaagctgggctgtgtgcacgaaccccccgttcagcccgaccgctgcgccttatccggtaactatcgtcttgagtccaacccggtaagacacgacttatcgccactggcagcagccactggtaacaggattagcagagcgaggtatgtaggcggtgctacagagttcttgaagtggtggcctaactacggctacactagaagaacagtatttggtatctgcgctctgctgaagccagttaccttcggaaaaagagttggtagctcttgatccggcaaacaaaccaccgctggtagcggtggtttttttgtttgcaagcagcagattacgcgcagaaaaaaaggatctcaagaagatcctttgatcttttctacggggtctgacgctcagtggaacgaaaactcacgttaagggattttggtcatgagattatcaaaaaggatcttcacctagaaggtcctgtattagaggtcacgtgagtgttttgcgacattttgcgacaccatgtggtcacgctgggtatttaagcccgagtgagcacgcagggtctccattttgaagcgggaggtttgaacgcgcagccgccatccttttaaattaaaaatgaagttttaaatcaagcccaatctgaataatgttacaaccaattaaccaattctgattagaaaaactcatcgagcatcaaatgaaactgcaatttattcatatcaggattatcaataccatatttttgaaaaagccgtttctgtaatgaaggagaaaactcaccgaggcagttccataggatggcaagatcctggtatcggtctgcgattccgactcgtccaacatcaatacaacctattaatttcccctcgtcaaaaataaggttatcaagtgagaaatcaccatgagtgacgactgaatccggtgagaatggcaaaagtttatgcatttctttccagacttgttcaacaggccagccattacgctcgtcatcaaaatcactcgcatcaaccaaaccgttattcattcgtgattgcgcctgagcgagacgaaatacgcgatcgctgttaaaaggacaattacaaacaggaatcgaatgcaaccggcgcaggaacactgccagcgcatcaacaatattttcacctgaatcaggatattcttctaatacctggaatgctgtttttccggggatcgcagtggtgagtaaccatgcatcatcaggagtacggataaaatgcttgatggtcggaagaggcataaattccgtcagccagtttagtctgaccatctcatctgtaacatcattggcaacgctacctttgccatgtttcagaaacaactctggcgcatcgggcttcccatacaagcgatagattgtcgcacctgattgcccgacattatcgcgagcccatttatacccatataaatcagcatccatgttggaatttaatcgcggcctcgacgtttcccgttgaatatggctcataacaccccttgtattactgtttatgtaagcagacagttttattgttcatgatgatatatttttatcttgtgcaatgtaacatcagagattttgagacacgggccagagctgca

SEQ ID NO: 185 - DNA, 5505 bp, synthetic construct; identical to SEQ ID NO: 25
  source 1..5505: mol_type = other DNA

SEQ ID NO: 186 - DNA, 2208 bp, synthetic construct
  source 1..2208: mol_type = other DNA
atggctgccgatggttatcttccagattggctcgaggacactctctctgaaggaataagacagtggtggaagctcaaacctggcccaccaccaccaaagcccgcagagcggcataaggacgacagcaggggtcttgtgcttcctgggtacaagtacctcggacccttcaacggactcgacaagggagagccggtcaacgaggcagacgccgcggccctcgagcacgacaaagcctacgaccggcagctcgacagcggagacaacccgtacctcaagtacaaccacgccgacgcggagtttcaggagcgccttaaagaagatacgtcttttgggggcaacctcggacgagcagtcttccaggcgaaaaagagggttcttgaacctctgggcctggtagaggaacctgttaagacggctccgggaaaaaagaggccggtagagcactctcctgtggagccagactcctcctcgggaaccggaaaggcgggccagcagcctgcaagaaaaagattgaattttggtcagactggagacgcagactcagtacctgacccccagcctctcggacagccaccagcagccccctctggtctgggaactaatacgatggctacaggcagtggcgcaccaatggcagacaataacgagggcgccgacggagtgggtaattcctcgggaaattggcattgcgattccacatggatgggcgacagagtcatcaccaccagcacccgaacctgggccctgcccacctacaacaaccacctctacaaacaaatttccagccaatcaggagcctcgaacgacaatcactactttggctacagcaccccttgggggtattttgacttcaacagattccactgccacttttcaccacgtgactggcaaagactcatcaacaacaactggggattccgacccaagagactcaacttcaagctctttaacattcaagtcaaagaggtcacgcagaatgacggtacgacgacgattgccaataaccttaccagcacggttcaggtgtttactgactcggagtaccagctcccgtacgtcctcggctcggcgcatcaaggatgcctcccgccgttcccagcagacgtcttcatggtgccacagtatggatacctcaccctgaacaacgggagtcaggcagtaggacgctcttcattttactgcctggagtactttccttctcagatgctgcgtaccggaaacaactttaccttcagctacacttttgaggacgttcctttccacagcagctacgctcacagccagagtctggaccgtctcatgaatcctctcatcgaccagtacctgtattacttgagcagaacaaacactccaagtggaaccaccacgcagtcaaggcttcagttttctcaggccggagcgagtgacattcgggaccagtctaggaactggcttcctggaccctgttaccgccagcagcgagtatcaaagacatctgcggataacaacaacagtgaatactcgtggactggagctaccaagtaccacctcaatggcagagactctctggtgaatccgggcccggccatggcaagccacaaggacgatgaagaaaagttttttcctcagagcggggttctcatctttgggaagcaaggctcagagaaaacaaatgtggacattgaaaaggtcatgattacagacgaagaggaaatcaggacaaccaatcccgtggctacggagcagtatggttctgtatctaccaacctccagagaggcaacagacaagcagctaccgcagatgtcaacacacaaggcgttcttccaggcatggtctggcaggacagagatgtgtaccttcaggggcccatctgggcaaagattccacacacggacggacattttcacccctctcccctcatgggtggattcggacttaaacaccctcctccacagattctcatcaagaacaccccggtacctgcgaatccttcgaccaccttcagtgcggcaaagtttgcttccttcatcacacagtactccacgggacaggtcagcgtggagatcgagtgggagctgcagaaggaaaacagcaaacgctggaatcccgaaattcagtacacttccaactacaacaagtctgttaatgtggactttactgtggacactaatggcgtgtattcagagcctcgccccattggcaccagatacctgactcgtaatctgtaa

SEQ ID NO: 187 - DNA, 4090 bp, synthetic construct
  source 1..4090: mol_type = other DNA
atgccggggttttacgagattgtgattaaggtccccagcgaccttgacgagcatctgcccggcatttctgacagctttgtgaactgggtggccgagaaggaatgggagttgccgccagattctgacatggatctgaatctgattgagcaggcacccctgaccgtggccgagaagctgcagcgcgactttctgacggaatggcgccgtgtgagtaaggccccggaggctcttttctttgtgcaatttgagaagggagagagctacttccacatgcacgtgctcgtggaaaccaccggggtgaaatccatggttttgggacgtttcctgagtcagattcgcgaaaaactgattcagagaatttaccgcgggatcgagccgactttgccaaactggttcgcggtcacaaagaccagaaatggcgccggaggcgggaacaaggtggtggatgagtgctacatccccaattacttgctccccaaaacccagcctgagctccagtgggcgtggactaatatggaacagtatttaagcgcctgtttgaatctcacggagcgtaaacggttggtggcgcagcatctgacgcacgtgtcgcagacgcaggagcagaacaaagagaatcagaatcccaattctgatgcgccggtgatcagatcaaaaacttcagccaggtacatggagctggtcgggtggctcgtggacaaggggattacctcggagaagcagtggatccaggaggaccaggcctcatacatctccttcaatgcggcctccaactcgcggtcccaaatcaaggctgccttggacaatgcgggaaagattatgagcctgactaaaaccgcccccgactacctggtgggccagcagcccgtggaggacatttccagcaatcggatttataaaattttggaactaaacgggtacgatccccaatatgcggcttccgtctttctgggatgggccacgaaaaagttcggcaagaggaacaccatctggctgtttgggcctgcaactaccgggaagaccaacatcgcggaggccatagcccacactgtgcccttctacgggtgcgtaaactggaccaatgagaactttcccttcaacgactgtgtcgacaagatggtgatctggtgggaggaggggaagatgaccgccaaggtcgtggagtcggccaaagccattctcggaggaagcaaggtgcgcgtggaccagaaatgcaagtcctcggcccagatagacccgactcccgtgatcgtcacctccaacaccaacatgtgcgccgtgattgacgggaactcaacgaccttcgaacaccagcagccgttgcaagaccggatgttcaaatttgaactcacccgccgtctggatcatgactttgggaaggtcaccaagcaggaagtcaaagactttttccggtgggcaaaggatcacgtggttgaggtggagcatgaattctacgtcaaaaagggtggagccaagaaaagacccgcccccagtgacgcagatataagtgagcccaaacgggtgcgcgagtcagttgcgcagccatcgacgtcagacgcggaagcttcgatcaactacgcagacaggtaccaaaacaaatgttctcgtcacgtgggcatgaatctgatgctgtttccctgcagacaatgcgagagaatgaatcagaattcaaatatctgcttcactcacggacagaaagactgtttagagtgctttcccgtgtcagaatctcaacccgtttctgtcgtcaaaaaggcgtatcagaaactgtgctacattcatcatatcatgggaaaggtgccagacgcttgcactgcctgcgatctggtcaatgtggatttggatgactgcatctttgaacaataaatgatttaaatcaggtatggctgccgatggttatcttccagattggctcgaggacactctctctgaaggaataagacagtggtggaagctcaaacctggcccaccaccaccaaagcccgcagagcggcataaggacgacagcaggggtcttgtgcttcctgggtacaagtacctcggacccttcaacggactcgacaagggagagccggtcaacgaggcagacgccgcggccctcgagcacgacaaagcctacgaccggcagctcgacagcggagacaacccgtacctcaagtacaaccacgccgacgcggagtttcaggagcgccttaaagaagatacgtcttttgggggcaacctcggacgagcagtcttccaggcgaaaaagagggttcttgaacctctgggcctggtagaggaacctgttaagacggctccgggaaaaaagaggccggtagagcactctcctgtggagccagactcctcctcgggaaccggaaaggcgggccagcagcctgcaagaaaaagattgaattttggtcagactggagacgcagactcagtacctgacccccagcctctcggacagccaccagcagccccctctggtctgggaactaatacgatggctacaggcagtggcgcaccaatggcagacaataacgagggcgccgacggagtgggtaattcctcgggaaattggcattgcgattccacatggatgggcgacagagtcatcaccaccagcacccgaacctgggccctgcccacctacaacaaccacctctacaaacaaatttccagccaatcaggagcctcgaacgacaatcactactttggctacagcaccccttgggggtattttgacttcaacagattccactgccacttttcaccacgtgactggcaaagactcatcaacaacaactggggattccgacccaagagactcaacttcaagctctttaacattcaagtcaaagaggtcacgcagaatgacggtacgacgacgattgccaataaccttaccagcacggttcaggtgtttactgactcggagtaccagctcccgtacgtcctcggctcggcgcatcaaggatgcctcccgccgttcccagcagacgtcttcatggtgccacagtatggatacctcaccctgaacaacgggagtcaggcagtaggacgctcttcattttactgcctggagtactttccttctcagatgctgcgtaccggaaacaactttaccttcagctacacttttgaggacgttcctttccacagcagctacgctcacagccagagtctggaccgtctcatgaatcctctcatcgaccagtacctgtattacttgagcagaacaaacactccaagtggaaccaccacgcagtcaaggcttcagttttctcaggccggagcgagtgacattcgggaccagtctaggaactggcttcctggaccctgttaccgccagcagcgagtatcaaagacatctgcggataacaacaacagtgaatactcgtggactggagctaccaagtaccacctcaatggcagagactctctggtgaatccgggcccggccatggcaagccacaaggacgatgaagaaaagttttttcctcagagcggggttctcatctttgggaagcaaggctcagagaaaacaaatgtggacattgaaaaggtcatgattacagacgaagaggaaatcaggacaaccaatcccgtggctacggagcagtatggttctgtatctaccaacctccagagaggcaacagacaagcagctaccgcagatgtcaacacacaaggcgttcttccaggcatggtctggcaggacagagatgtgtaccttcaggggcccatctgggcaaagattccacacacggacggacattttcacccctctcccctcatgggtggattcggacttaaacaccctcctccacagattctcatcaagaacaccccggtacctgcgaatccttcgaccaccttcagtgcggcaaagtttgcttccttcatcacacagtactccacgggacaggtcagcgtggagatcgagtgggagctgcagaaggaaaacagcaaacgctggaatcccgaaattcagtacacttccaactacaacaagtctgttaatgtggactttactgtggacactaatggcgtgtattcagagcctcgccccattggcaccagatacctgactcgtaatctgtaa

SEQ ID NO: 188 - DNA, 9816 bp, synthetic construct
  source 1..9816: mol_type = other DNA
atgccggggttttacgagattgtgattaaggtccccagcgaccttgacgagcatctgcccggcatttctgacagctttgtgaactgggtggccgagaaggaatgggagttgccgccagattctgacatggatctgaatctgattgagcaggcacccctgaccgtggccgagaagctgcagcgcgactttctgacggaatggcgccgtgtgagtaaggccccggaggctcttttctttgtgcaatttgagaagggagagagctacttccacatgcacgtgctcgtggaaaccaccggggtgaaatccatggttttgggacgtttcctgagtcagattcgcgaaaaactgattcagagaatttaccgcgggatcgagccgactttgccaaactggttcgcggtcacaaagaccagaaatggcgccggaggcgggaacaaggtggtggatgagtgctacatccccaattacttgctccccaaaacccagcctgagctccagtgggcgtggactaatatggaacagtatttaagcgcctgtttgaatctcacggagcgtaaacggttggtggcgcagcatctgacgcacgtgtcgcagacgcaggagcagaacaaagagaatcagaatcccaattctgatgcgccggtgatcagatcaaaaacttcagccaggtacatggagctggtcgggtggctcgtggacaaggggattacctcggagaagcagtggatccaggaggaccaggcctcatacatctccttcaatgcggcctccaactcgcggtcccaaatcaaggctgccttggacaatgcgggaaagattatgagcctgactaaaaccgcccccgactacctggtgggccagcagcccgtggaggacatttccagcaatcggatttataaaattttggaactaaacgggtacgatccccaatatgcggcttccgtctttctgggatgggccacgaaaaagttcggcaagaggaacaccatctggctgtttgggcctgcaactaccgggaagaccaacatcgcggaggccatagcccacactgtgcccttctacgggtgcgtaaactggaccaatgagaactttcccttcaacgactgtgtcgacaagatggtgatctggtgggaggaggggaagatgaccgccaaggtcgtggagtcggccaaagccattctcggaggaagcaaggtgcgcgtggaccagaaatgcaagtcctcggcccagatagacccgactcccgtgatcgtcacctccaacaccaacatgtgcgccgtgattgacgggaactcaacgaccttcgaacaccagcagccgttgcaagaccggatgttcaaatttgaactcacccgccgtctggatcatgactttgggaaggtcaccaagcaggaagtcaaagactttttccggtgggcaaaggatcacgtggttgaggtggagcatgaattctacgtcaaaaagggtggagccaagaaaagacccgcccccagtgacgcagatataagtgagcccaaacgggtgcgcgagtcagttgcgcagccatcgacgtcagacgcggaagcttcgatcaactacgcagacaggtaccaaaacaaatgttctcgtcacgtgggcatgaatctgatgctgtttccctgcagacaatgcgagagaatgaatcagaattcaaatatctgcttcactcacggacagaaagactgtttagagtgctttcccgtgtcagaatctcaacccgtttctgtcgtcaaaaaggcgtatcagaaactgtgctacattcatcatatcatgggaaaggtgccagacgcttgcactgcctgcgatctggtcaatgtggatttggatgactgcatctttgaacaataaatgatttaaatcaggtatggctgccgatggttatcttccagattggctcgaggacactctctctgaaggaataagacagtggtggaagctcaaacctggcccaccaccaccaaagcccgcagagcggcataaggacgacagcaggggtcttgtgcttcctgggtacaagtacctcggacccttcaacggactcgacaagggagagccggtcaacgaggcagacgccgcggccctcgagcacgacaaagcctacgaccggcagctcgacagcggagacaacccgtacctcaagtacaaccacgccgacgcggagtttcaggagcgccttaaagaagatacgtcttttgggggcaacctcggacgagcagtcttccaggcgaaaaagagggttcttgaacctctgggcctggtagaggaacctgttaagacggctccgggaaaaaagaggccggtagagcactctcctgtggagccagactcctcctcgggaaccggaaaggcgggccagcagcctgcaagaaaaagattgaattttggtcagactggagacgcagactcagtacctgacccccagcctctcggacagccaccagcagccccctctggtctgggaactaatacgatggctacaggcagtggcgcaccaatggcagacaataacgagggcgccgacggagtgggtaattcctcgggaaattggcattgcgattccacatggatgggcgacagagtcatcaccaccagcacccgaacctgggccctgcccacctacaacaaccacctctacaaacaaatttccagccaatcaggagcctcgaacgacaatcactactttggctacagcaccccttgggggtattttgacttcaacagattccactgccacttttcaccacgtgactggcaaagactcatcaacaacaactggggattccgacccaagagactcaacttcaagctctttaacattcaagtcaaagaggtcacgcagaatgacggtacgacgacgattgccaataaccttaccagcacggttcaggtgtttactgactcggagtaccagctcccgtacgtcctcggctcggcgcatcaaggatgcctcccgccgttcccagcagacgtcttcatggtgccacagtatggatacctcaccctgaacaacgggagtcaggcagtaggacgctcttcattttactgcctggagtactttccttctcagatgctgcgtaccggaaacaactttaccttcagctacacttttgaggacgttcctttccacagcagctacgctcacagccagagtctggaccgtctcatgaatcctctcatcgaccagtacctgtattacttgagcagaacaaacactccaagtggaaccaccacgcagtcaaggcttcagttttctcaggccggagcgagtgacattcgggaccagtctaggaactggcttcctggaccctgttaccgccagcagcgagtatcaaagacatctgcggataacaacaacagtgaatactcgtggactggagctaccaagtaccacctcaatggcagagactctctggtgaatccgggcccggccatggcaagccacaaggacgatgaagaaaagttttttcctcagagcggggttctcatctttgggaagcaaggctcagagaaaacaaatgtggacattgaaaaggtcatgattacagacgaagaggaaatcaggacaaccaatcccgtggctacggagcagtatggttctgtatctaccaacctccagagaggcaacagacaagcagctaccgcagatgtcaacacacaaggcgttcttccaggcatggtctggcaggacagagatgtgtaccttcaggggcccatctgggcaaagattccacacacggacggacattttcacccctctcccctcatgggtggattcggacttaaacaccctcctccacagattctcatcaagaacaccccggtacctgcgaatccttcgaccaccttcagtgcggcaaagtttgcttccttcatcacacagtactccacgggacaggtcagcgtggagatcgagtgggagctgcagaaggaaaacagcaaacgctggaatcccgaaattcagtacacttccaactacaacaagtctgttaatgtggactttactgtggacactaatggcgtgtattcagagcctcgccccattggcaccagatacctgactcgtaatctgtaattgcctgttaatcaataaaccggttgattcgtttcagttgaactttggtctctgcgaagggcgaattcgtttaaacctgcaggactagagccgaattctgcatcgcgatagggataacagggtaataaataatgtactagagacactttcaataaaggcaaatgcttttatttgtacactctcgggtgattatttacccccacccttgccgtctgcgccgtttaaaaatcaaaggggttctgccgcgcatcgctatgcgccactggcagggacacgttgcgatactggtgtttagtgctccacttaaactcaggcacaaccatccgcggcagctcggtgaagttttcactccacaggctgcgcaccatcaccaacgcgtttagcaggtcgggcgccgatatcttgaagtcgcagttggggcctccgccctgcgcgcgcgagttgcgatacacagggttgcagcactggaacactatcagcgccgggtggtgcacgctggccagcacgctcttgtcggagatcagatccgcgtccaggtcctccgcgttgctcagggcgaacggagtcaactttggtagctgccttcccaaaaagggcgcgtgcccaggctttgagttgcactcgcaccgtagtggcatcaaaaggtgaccgtgcccggtctgggcgttaggatacagcgcctgcataaaagccttgatctgcttaaaagccacctgagcctttgcgccttcagagaagaacatgccgcaagacttgccggaaaactgattggccggacaggccgcgtcgtgcacgcagcaccttgcgtcggtgttggagatctgcaccacatttcggccccaccggttcttcacgatcttggccttgctagactgctccttcagcgcgcgctgcccgttttcgctcgtcacatccatttcaatcacgtgctccttatttatcataatgcttccgtgtagacacttaagctcgccttcgatctcagcgcagcggtgcagccacaacgcgcagcccgtgggctcgtgatgcttgtaggtcacctctgcaaacgactgcaggtacgcctgcaggaatcgccccatcatcgtcacaaaggtcttgttgctggtgaaggtcagctgcaacccgcggtgctcctcgttcagccaggtcttgcatacggccgccagagcttccacttggtcaggcagtagtttgaagttcgcctttagatcgttatccacgtggtacttgtccatcagcgcgcgcgcagcctccatgcccttctcccacgcagacacgatcggcacactcagcgggttcatcaccgtaatttcactttccgcttcgctgggctcttcctcttcctcttgcgtccgcataccacgcgccactgggtcgtcttcattcagccgccgcactgtgcgcttacctcctttgccatgcttgattagcaccggtgggttgctgaaacccaccatttgtagcgccacatcttctctttcttcctcgctgtccacgattacctctggtgatggcgggcgctcgggcttgggagaagggcgcttctttttcttcttgggcgcaatggccaaatccgccgccgaggtcgatggccgcgggctgggtgtgcgcggcaccagcgcgtcttgtgatgagtcttcctcgtcctcggactcgatacgccgcctcatccgcttttttgggggcgcccggggaggcggcggcgacggggacggggacgacacgtcctccatggttgggggacgtcgcgccgcaccgcgtccgcgctcgggggtggtttcgcgctgctcctcttcccgactggccatttccttctcctataggcagaaaaagatcgttgaaactcactccggggctgtggacgtcggcttaccttcgcaaatttgtacctgaggactaccacgcccacgagattaggttctacgaagaccaatcccgcccgcctaatgcggagcttaccgcctgcgtcattacccagggccacattcttggccaattgcaagccatcaacaaagcccgccaagagtttctgctacgaaagggacggggggtttacttggacccccagtccggcgaggagctcaacccaatccccccgccgccgcagccctatcagcagcagccgcgggcccttgcttcccaggatggcacccaaaaagaagctgcagctgccgccgccacccacggacgaggaggaatactgggacagtcaggcagaggaggttttggacgaggaggaggaggacatgatggaagactgggagagcctagacgaggaagcttccgaggtcgaagaggtgtcagacgaaacaccgtcaccctcggtcgcattcccctcgccggcgccccagaaatcggcaaccggttccagcatggctacaacctccgctcctcaggcgccgccggcactgcccgttcgccgacccaaccgtagatgggacaccactggaaccagggccggtaagtccaagcagccgccgccgttagcccaagagcaacaacagcgccaaggctaccgctcatggcgcgggcacaagaacgccatagttgcttgcttgcaagactgtgggggcaacatctccttcgcccgccgctttcttctctaccatcacggcgtggccttcccccgtaacatcctgcattactaccgtcatctctacagcccatactgcaccggcggcagcggcagcaacagcagcggccacacagaagcaaaggcgaccggatagcaagactctgacaaagcccaagaaatccacagcggcggcagcagcaggaggaggagcgctgcgtctggcgcccaacgaacccgtatcgacccgcgagcttagaaacaggatttttcccactctgtatgctatatttcaacagagcaggggccaagaacaagagctgaaaataaaaaacaggtctctgcgatccctcacccgcagctgcctgtatcacaaaagcgaagatcagcttcggcgcacgctggaagacgcggaggctctcttcagtaaatactgcgcgctgactcttaaggactagtttcgcgccctttctcaaatttaagcgcgaaaactacgtcatctccagcggccacacccggcgccagcacctgttgtcagcgccattttttagggcggagtaacttgtatgtgttgggaattgtagttttcttaaaatgggaagtgacgtaacgtgggaaaacggaagtgacgatttgaggaagttgtgggttttttggctttcgtttctgggcgtaggttcgcgtgcggttttctgggtgttttttgtggactttaaccgttacgtcattttttagtcctatatatactcgctctgcacttggcccttttttacactgtgactgattgagctggtgccgtgtcgagtggtgtttttttaataggttttcttttttactggtaaggctgactgttatgactacgtccggcgttccatttggcatgacactacgaccaacacgatctcggttgtctcggcgcactccgtacagtagggatcgtctacctccttttgagacagaaacccgcgctaccatactggaggatcatccgctgctgcccgaatgtaacactttgacaatgcacaacgtgagttacgtgcgaggtcttccctgcagtgtgggatttacgctgattcaggaatgggttgttccctgggatatggttctaacgcgggaggagcttgtaatcctgaggaagtgtatgcacgtgtgcctgtgttgtgccaacattgatatcatgacgagcatgatgatccatggttacgagtcctgggctctccactgtcattgttccagtcccggttccctgcagtgtatagccggcgggcaggttttggccagctggtttaggatggtggtggatggcgccatgtttaatcagaggtttatatggtaccgggaggtggtgaattacaacatgccaaaagaggtaatgtttatgtccagcgtgtttatgaggggtcgccacttaatctacctgcgcttgtggtatgatggccacgtgggttctgtggtccccgccatgagctttggatacagcgccttgcactgtgggattttgaacaatattgtggtgctgtgctgcagttactgtgctgatttaagtgagatcagggtgcgctgctgtgcccggaggacaaggcgccttatgctgcgggcggtgcgaatcatcgctgaggagaccactgccatgttgtattcctgcaggacggagcggcggcggcagcagtttattcgcgcgctgctgcagcaccaccgccctatcctgatgcacgattatgactctacccccatgtaggcgtggacttctccttcgccgcccgttaagcaaccgcaagttggacagcagcctgtggctcagcagctggacagcgacatgaacttaagtgagctgcccggggagtttattaatatcactgatgagcgtttggctcgacaggaaaccgtgtggaatataacacctaagaatatgtctgttacccatgatatgatgctttttaaggccagccggggagaaaggactgtgtactctgtgtgttgggagggaggtggcaggttgaatactagggttctgtgagtttgattaaggtacggtgatctgtataagctatgtggtggtggggctatactactgaatgaaaaatgacttgaaattttctgcaattgaaaaataaacacgttgaaacataacacaaacgattctttattcttgggcaatgtatgaaaaagtgtaagaggatgtggcaaatatttcattaatgtagttgtggccagaccagtcccatgaaaatgacatagagtatgcacttggagttgtgtctcctgtttcctgtgtaccgtttagtgtaatggttagtgttacaggtttagttttgtctccgtttaagtaaacttgactgacaatgttacttttggcagttttaccgtgagattttggataagctgataggttaggcataaatccaacagcgtttgtataggctgtcgcccctcctgacgcggtaggaggaggggagggtgccctgcatgtctgccgctgctcttgctcttgccgctgctgaggaggggggcgcatctgccgcagcaccggatgcatctgggaaaagcaaaaaaggggctcgtccctgtttccggaggaatttgcaagcggggtcttgcatgacggggaggcaaacccccgttcgccgcagtccggccggtccgagactcgaaccgggggtcccgcgactcaacccttggaaaataaccctccggctacagggagcgagccacttaatgctttcgctttccagcctaaccgcttacgctgcgcgcggccagtggccaaaaaagctagcgcagcagccgccgcgcctggaaggaagccaaaaggagcactcccccgttgtctgacgtcgcacacctgggttcgacacgcgggcggtaaccgcatggatcacggcggacggccggatacggggctcgaaccccggtcgtccgccatgatacccttgcgaatttatccaccagaccacggaagagtgcccgcttacaggctctccttttgcacggtctagagcgtcaacgattgcgcgcgcctgaccggccagagcgtcccgaccatggagcactttttgccgctgcgcaacatctggaaccgcgtccgcgactttccgcgcgcctccaccaccgccgccggcatcacctggatgtccaggtacatctacggata

SEQ ID NO: 189 - DNA, 12579 bp, synthetic construct
  source 1..12579: mol_type = other DNA
tcgcgcgtttcggtgatgacggtgaaaacctctgacacatgcagctcccggagacggtcacagcttgtctgtaagcggatgccgggagcagacaagcccgtcagggcgcgtcagcgggtgttggcgggtgtcggggctggcttaactatgcggcatcagagcagattgtactgagagtgcaccatatgcggtgtgaaataccgcacagatgcgtaaggagaaaataccgcatcaggcgccattcgccattcaggctgcgcaactgttgggaagggcgatcggtgcgggcctcttcgctattacgccagctggcgaaagggggatgtgctgcaaggcgattaagttgggtaacgccagggttttcccagtcacgacgttgtaaaacgacggccagagaattccgcagggtctccattttgaagcgggaggtttgaacgcgcagccgccatgccggggttttacgagattgtgattaaggtccccagcgaccttgacgagcatctgcccggcatttctgacagctttgtgaactgggtggccgagaaggaatgggagttgccgccagattctgacatggatctgaatctgattgagcaggcacccctgaccgtggccgagaagctgcagcgcgactttctgacggaatggcgccgtgtgagtaaggccccggaggctcttttctttgtgcaatttgagaagggagagagctacttccacatgcacgtgctcgtggaaaccaccggggtgaaatccatggttttgggacgtttcctgagtcagattcgcgaaaaactgattcagagaatttaccgcgggatcgagccgactttgccaaactggttcgcggtcacaaagaccagaaatggcgccggaggcgggaacaaggtggtggatgagtgctacatccccaattacttgctccccaaaacccagcctgagctccagtgggcgtggactaatatggaacagtatttaagcgcctgtttgaatctcacggagcgtaaacggttggtggcgcagcatctgacgcacgtgtcgcagacgcaggagcagaacaaagagaatcagaatcccaattctgatgcgccggtgatcagatcaaaaacttcagccaggtacatggagctggtcgggtggctcgtggacaaggggattacctcggagaagcagtggatccaggaggaccaggcctcatacatctccttcaatgcggcctccaactcgcggtcccaaatcaaggctgccttggacaatgcgggaaagattatgagcctgactaaaaccgcccccgactacctggtgggccagcagcccgtggaggacatttccagcaatcggatttataaaattttggaactaaacgggtacgatccccaatatgcggcttccgtctttctgggatgggccacgaaaaagttcggcaagaggaacaccatctggctgtttgggcctgcaactaccgggaagaccaacatcgcggaggccatagcccacactgtgcccttctacgggtgcgtaaactggaccaatgagaactttcccttcaacgactgtgtcgacaagatggtgatctggtgggaggaggggaagatgaccgccaaggtcgtggagtcggccaaagccattctcggaggaagcaaggtgcgcgtggaccagaaatgcaagtcctcggcccagatagacccgactcccgtgatcgtcacctccaacaccaacatgtgcgccgtgattgacgggaactcaacgaccttcgaacaccagcagccgttgcaagaccggatgttcaaatttgaactcacccgccgtctggatcatgactttgggaaggtcaccaagcaggaagtcaaagactttttccggtgggcaaaggatcacgtggttgaggtggagcatgaattctacgtcaaaaagggtggagccaagaaaagacccgcccccagtgacgcagatataagtgagcccaaacgggtgcgcgagtcagttgcgcagccatcgacgtcagacgcggaagcttcgatcaactacgcagacaggtaccaaaacaaatgttctcgtcacgtgggcatgaatctgatgctgtttccctgcagacaatgcgagagaatgaatcagaattcaaatatctgcttcactcacggacagaaagactgtttagagtgctttcccgtgtcagaatctcaacccgtttctgtcgtcaaaaaggcgtatcagaaactgtgctacattcatcatatcatgggaaaggtgccagacgcttgcactgcctgcgatctggtcaatgtggatttggatgactgcatctttgaacaataaatgatttaaatcaggtatggctgccgatggttatcttccagattggctcgaggacactctctctgaaggaataagacagtggtggaagctcaaacctggcccaccaccaccaaagcccgcagagcggcataaggacgacagcaggggtcttgtgcttcctgggtacaagtacctcggacccttcaacggactcgacaagggagagccggtcaacgaggcagacgccgcggccctcgagcacgacaaagcctacgaccggcagctcgacagcggagacaacccgtacctcaagtacaaccacgccgacgcggagtttcaggagcgccttaaagaagatacgtcttttgggggcaacctcggacgagcagtcttccaggcgaaaaagagggttcttgaacctctgggcctggtagaggaacctgttaagacggctccgggaaaaaagaggccggtagagcactctcctgtggagccagactcctcctcgggaaccggaaaggcgggccagcagcctgcaagaaaaagattgaattttggtcagactggagacgcagactcagtacctgacccccagcctctcggacagccaccagcagccccctctggtctgggaactaatacgatggctacaggcagtggcgcaccaatggcagacaataacgagggcgccgacggagtgggtaattcctcgggaaattggcattgcgattccacatggatgggcgacagagtcatcaccaccagcacccgaacctgggccctgcccacctacaacaaccacctctacaaacaaatttccagccaatcaggagcctcgaacgacaatcactactttggctacagcaccccttgggggtattttgacttcaacagattccactgccacttttcaccacgtgactggcaaagactcatcaacaacaactggggattccgacccaagagactcaacttcaagctctttaacattcaagtcaaagaggtcacgcagaatgacggtacgacgacgattgccaataaccttaccagcacggttcaggtgtttactgactcggagtaccagctcccgtacgtcctcggctcggcgcatcaaggatgcctcccgccgttcccagcagacgtcttcatggtgccacagtatggatacctcaccctgaacaacgggagtcaggcagtaggacgctcttcattttactgcctggagtactttccttctcagatgctgcgtaccggaaacaactttaccttcagctacacttttgaggacgttcctttccacagcagctacgctcacagccagagtctggaccgtctcatgaatcctctcatcgaccagtacctgtattacttgagcagaacaaacactccaagtggaaccaccacgcagtcaaggcttcagttttctcaggccggagcgagtgacattcgggaccagtctaggaactggcttcctggaccctgttaccgccagcagcgagtatcaaagacatctgcggataacaacaacagtgaatactcgtggactggagctaccaagtaccacctcaatggcagagactctctggtgaatccgggcccggccatggcaagccacaaggacgatgaagaaaagttttttcctcagagcggggttctcatctttgggaagcaaggctcagagaaaacaaatgtggacattgaaaaggtcatgattacagacgaagaggaaatcaggacaaccaatcccgtggctacggagcagtatggttctgtatctaccaacctccagagaggcaacagacaagcagctaccgcagatgtcaacacacaaggcgttcttccaggcatggtctggcaggacagagatgtgtaccttcaggggcccatctgggcaaagattccacacacggacggacattttcacccctctcccctcatgggtggattcggacttaaacaccctcctccacagattctcatcaagaacaccccggtacctgcgaatccttcgaccaccttcagtgcggcaaagtttgcttccttcatcacacagtactccacgggacaggtcagcgtggagatcgagtgggagctgcagaaggaaaacagcaaacgctggaatcccgaaattcagtacacttccaactacaacaagtctgttaatgtggactttactgtggacactaatggcgtgtattcagagcctcgccccattggcaccagatacctgactcgtaatctgtaattgcctgttaatcaataaaccggttgattcgtttcagttgaactttggtctctgcgaagggcgaattcgtttaaacctgcaggactagagccgaattctgcatcgcgatagggataacagggtaataaataatgtactagagacactttcaataaaggcaaatgcttttatttgtacactctcgggtgattatttacccccacccttgccgtctgcgccgtttaaaaatcaaaggggttctgccgcgcatcgctatgcgccactggcagggacacgttgcgatactggtgtttagtgctccacttaaactcaggcacaaccatccgcggcagctcggtgaagttttcactccacaggctgcgcaccatcaccaacgcgtttagcaggtcgggcgccgatatcttgaagtcgcagttggggcctccgccctgcgcgcgcgagttgcgatacacagggttgcagcactggaacactatcagcgccgggtggtgcacgctggccagcacgctcttgtcggagatcagatccgcgtccaggtcctccgcgttgctcagggcgaacggagtcaactttggtagctgccttcccaaaaagggcgcgtgcccaggctttgagttgcactcgcaccgtagtggcatcaaaaggtgaccgtgcccggtctgggcgttaggatacagcgcctgcataaaagccttgatctgcttaaaagccacctgagcctttgcgccttcagagaagaacatgccgcaagacttgccggaaaactgattggccggacaggccgcgtcgtgcacgcagcaccttgcgtcggtgttggagatctgcaccacatttcggccccaccggttcttcacgatcttggccttgctagactgctccttcagcgcgcgctgcccgttttcgctcgtcacatccatttcaatcacgtgctccttatttatcataatgcttccgtgtagacacttaagctcgccttcgatctcagcgcagcggtgcagccacaacgcgcagcccgtgggctcgtgatgcttgtaggtcacctctgcaaacgactgcaggtacgcctgcaggaatcgccccatcatcgtcacaaaggtcttgttgctggtgaaggtcagctgcaacccgcggtgctcctcgttcagccaggtcttgcatacggccgccagagcttccacttggtcaggcagtagtttgaagttcgcctttagatcgttatccacgtggtacttgtccatcagcgcgcgcgcagcctccatgcccttctcccacgcagacacgatcggcacactcagcgggttcatcaccgtaatttcactttccgcttcgctgggctcttcctcttcctcttgcgtccgcataccacgcgccactgggtcgtcttcattcagccgccgcactgtgcgcttacctcctttgccatgcttgattagcaccggtgggttgctgaaacccaccatttgtagcgccacatcttctctttcttcctcgctgtccacgattacctctggtgatggcgggcgctcgggcttgggagaagggcgcttctttttcttcttgggcgcaatggccaaatccgccgccgaggtcgatggccgcgggctgggtgtgcgcggcaccagcgcgtcttgtgatgagtcttcctcgtcctcggactcgatacgccgcctcatccgcttttttgggggcgcccggggaggcggcggcgacggggacggggacgacacgtcctccatggttgggggacgtcgcgccgcaccgcgtccgcgctcgggggtggtttcgcgctgctcctcttcccgactggccatttccttctcctataggcagaaaaagatcgttgaaactcactccggggctgtggacgtcggcttaccttcgcaaatttgtacctgaggactaccacgcccacgagattaggttctacgaagaccaatcccgcccgcctaatgcggagcttaccgcctgcgtcattacccagggccacattcttggccaattgcaagccatcaacaaagcccgccaagagtttctgctacgaaagggacggggggtttacttggacccccagtccggcgaggagctcaacccaatccccccgccgccgcagccctatcagcagcagccgcgggcccttgcttcccaggatggcacccaaaaagaagctgcagctgccgccgccacccacggacgaggaggaatactgggacagtcaggcagaggaggttttggacgaggaggaggaggacatgatggaagactgggagagcctagacgaggaagcttccgaggtcgaagaggtgtcagacgaaacaccgtcaccctcggtcgcattcccctcgccggcgccccagaaatcggcaaccggttccagcatggctacaacctccgctcctcaggcgccgccggcactgcccgttcgccgacccaaccgtagatgggacaccactggaaccagggccggtaagtccaagcagccgccgccgttagcccaagagcaacaacagcgccaaggctaccgctcatggcgcgggcacaagaacgccatagttgcttgcttgcaagactgtgggggcaacatctccttcgcccgccgctttcttctctaccatcacggcgtggccttcccccgtaacatcctgcattactaccgtcatctctacagcccatactgcaccggcggcagcggcagcaacagcagcggccacacagaagcaaaggcgaccggatagcaagactctgacaaagcccaagaaatccacagcggcggcagcagcaggaggaggagcgctgcgtctggcgcccaacgaacccgtatcgacccgcgagcttagaaacaggatttttcccactctgtatgctatatttcaacagagcaggggccaagaacaagagctgaaaataaaaaacaggtctctgcgatccctcacccgcagctgcctgtatcacaaaagcgaagatcagcttcggcgcacgctggaagacgcggaggctctcttcagtaaatactgcgcgctgactcttaaggactagtttcgcgccctttctcaaatttaagcgcgaaaactacgtcatctccagcggccacacccggcgccagcacctgttgtcagcgccattttttagggcggagtaacttgtatgtgttgggaattgtagttttcttaaaatgggaagtgacgtaacgtgggaaaacggaagtgacgatttgaggaagttgtgggttttttggctttcgtttctgggcgtaggttcgcgtgcggttttctgggtgttttttgtggactttaaccgttacgtcattttttagtcctatatatactcgctctgcacttggcccttttttacactgtgactgattgagctggtgccgtgtcgagtggtgtttttttaataggttttcttttttactggtaaggctgactgttatgactacgtccggcgttccatttggcatgacactacgaccaacacgatctcggttgtctcggcgcactccgtacagtagggatcgtctacctccttttgagacagaaacccgcgctaccatactggaggatcatccgctgctgcccgaatgtaacactttgacaatgcacaacgtgagttacgtgcgaggtcttccctgcagtgtgggatttacgctgattcaggaatgggttgttccctgggatatggttctaacgcgggaggagcttgtaatcctgaggaagtgtatgcacgtgtgcctgtgttgtgccaacattgatatcatgacgagcatgatgatccatggttacgagtcctgggctctccactgtcattgttccagtcccggttccctgcagtgtatagccggcgggcaggttttggccagctggtttaggatggtggtggatggcgccatgtttaatcagaggtttatatggtaccgggaggtggtgaattacaacatgccaaaagaggtaatgtttatgtccagcgtgtttatgaggggtcgccacttaatctacctgcgcttgtggtatgatggccacgtgggttctgtggtccccgccatgagctttggatacagcgccttgcactgtgggattttgaacaatattgtggtgctgtgctgcagttactgtgctgatttaagtgagatcagggtgcgctgctgtgcccggaggacaaggcgccttatgctgcgggcggtgcgaatcatcgctgaggagaccactgccatgttgtattcctgcaggacggagcggcggcggcagcagtttattcgcgcgctgctgcagcaccaccgccctatcctgatgcacgattatgactctacccccatgtaggcgtggacttctccttcgccgcccgttaagcaaccgcaagttggacagcagcctgtggctcagcagctggacagcgacatgaacttaagtgagctgcccggggagtttattaatatcactgatgagcgtttggctcgacaggaaaccgtgtggaatataacacctaagaatatgtctgttacccatgatatgatgctttttaaggccagccggggagaaaggactgtgtactctgtgtgttgggagggaggtggcaggttgaatactagggttctgtgagtttgattaaggtacggtgatctgtataagctatgtggtggtggggctatactactgaatgaaaaatgacttgaaattttctgcaattgaaaaataaacacgttgaaacataacacaaacgattctttattcttgggcaatgtatgaaaaagtgtaagaggatgtggcaaatatttcattaatgtagttgtggccagaccagtcccatgaaaatgacatagagtatgcacttggagttgtgtctcctgtttcctgtgtaccgtttagtgtaatggttagtgttacaggtttagttttgtctccgtttaagtaaacttgactgacaatgttacttttggcagttttaccgtgagattttggataagctgataggttaggcataaatccaacagcgtttgtataggctgtcgcccctcctgacgcggtaggaggaggggagggtgccctgcatgtctgccgctgctcttgctcttgccgctgctgaggaggggggcgcatctgccgcagcaccggatgcatctgggaaaagcaaaaaaggggctcgtccctgtttccggaggaatttgcaagcggggtcttgcatgacggggaggcaaacccccgttcgccgcagtccggccggtccgagactcgaaccgggggtcccgcgactcaacccttggaaaataaccctccggctacagggagcgagccacttaatgctttcgctttccagcctaaccgcttacgctgcgcgcggccagtggccaaaaaagctagcgcagcagccgccgcgcctggaaggaagccaaaaggagcactcccccgttgtctgacgtcgcacacctgggttcgacacgcgggcggtaaccgcatggatcacggcggacggccggatacggggctcgaaccccggtcgtccgccatgatacccttgcgaatttatccaccagaccacggaagagtgcccgcttacaggctctccttttgcacggtctagagcgtcaacgattgcgcgcgcctgaccggccagagcgtcccgaccatggagcactttttgccgctgcgcaacatctggaaccgcgtccgcgactttccgcgcgcctccaccaccgccgccggcatcacctggatgtccaggtacatctacggatatggcaaacagctattatgggtattatgggtgcggccgcggatcccgggcccgtcgactgcagaggcctgcatgcaagcttggtgtaatcatggtcatagctgtttcctgtgtgaaattgttatccgctcacaattccacacaacatacgagccggaagcataaagtgtaaagcctggggtgcctaatgagtgagctaactcacattaattgcgttgcgctcactgcccgctttccagtcgggaaacctgtcgtgccagctgcattaatgaatcggccaacgcgcggggagaggcggtttgcgtattgggcgctcttccgcttcctcgctcactgactcgctgcgctcggtcgttcggctgcggcgagcggtatcagctcactcaaaggcggtaatacggttatccacagaatcaggggataacgcaggaaagaacatgtgagcaaaaggccagcaaaaggccaggaaccgtaaaaaggccgcgttgctggcgtttttccataggctccgcccccctgacgagcatcacaaaaatcgacgctcaagtcagaggtggcgaaacccgacaggactataaagataccaggcgtttccccctggaagctccctcgtgcgctctcctgttccgaccctgccgcttaccggatacctgtccgcctttctcccttcgggaagcgtggcgctttctcatagctcacgctgtaggtatctcagttcggtgtaggtcgttcgctccaagctgggctgtgtgcacgaaccccccgttcagcccgaccgctgcgccttatccggtaactatcgtcttgagtccaacccggtaagacacgacttatcgccactggcagcagccactggtaacaggattagcagagcgaggtatgtaggcggtgctacagagttcttgaagtggtggcctaactacggctacactagaagaacagtatttggtatctgcgctctgctgaagccagttaccttcggaaaaagagttggtagctcttgatccggcaaacaaaccaccgctggtagcggtggtttttttgtttgcaagcagcagattacgcgcagaaaaaaaggatctcaagaagatcctttgatcttttctacggggtctgacgctcagtggaacgaaaactcacgttaagggattttggtcatgagattatcaaaaaggatcttcacctagaaggtcctgtattagaggtcacgtgagtgttttgcgacattttgcgacaccatgtggtcacgctgggtatttaagcccgagtgagcacgcagggtctccattttgaagcgggaggtttgaacgcgcagccgccatccttttaaattaaaaatgaagttttaaatcaagcccaatctgaataatgttacaaccaattaaccaattctgattagaaaaactcatcgagcatcaaatgaaactgcaatttattcatatcaggattatcaataccatatttttgaaaaagccgtttctgtaatgaaggagaaaactcaccgaggcagttccataggatggcaagatcctggtatcggtctgcgattccgactcgtccaacatcaatacaacctattaatttcccctcgtcaaaaataaggttatcaagtgagaaatcaccatgagtgacgactgaatccggtgagaatggcaaaagtttatgcatttctttccagacttgttcaacaggccagccattacgctcgtcatcaaaatcactcgcatcaaccaaaccgttattcattcgtgattgcgcctgagcgagacgaaatacgcgatcgctgttaaaaggacaattacaaacaggaatcgaatgcaaccggcgcaggaacactgccagcgcatcaacaatattttcacctgaatcaggatattcttctaatacctggaatgctgtttttccggggatcgcagtggtgagtaaccatgcatcatcaggagtacggataaaatgcttgatggtcggaagaggcataaattccgtcagccagtttagtctgaccatctcatctgtaacatcattggcaacgctacctttgccatgtttcagaaacaactctggcgcatcgggcttcccatacaagcgatagattgtcgcacctgattgcccgacattatcgcgagcccatttatacccatataaatcagcatccatgttggaatttaatcgcggcctcgacgtttcccgttgaatatggctcataacaccccttgtattactgtttatgtaagcagacagttttattgttcatgatgatatatttttatcttgtgcaatgtaacatcagagattttgagacacgggccagagctgca

SEQ ID NO: 190 - DNA, 5505 bp, synthetic construct; identical to SEQ ID NO: 25
  source 1..5505: mol_type = other DNA

SEQ ID NO: 191 - DNA, 2208 bp, synthetic construct
  source 1..2208: mol_type = other DNA
atggctgccgatggttatcttccagattggctcgaggacactctctctgaaggaataagacagtggtggaagctcaaacctggcccaccaccaccaaagcccgcagagcggcataaggacgacagcaggggtcttgtgcttcctgggtacaagtacctcggacccttcaacggactcgacaagggagagccggtcaacgaggcagacgccgcggccctcgagcacgacaaagcctacgaccggcagctcgacagcggagacaacccgtacctcaagtacaaccacgccgacgcggagtttcaggagcgccttaaagaagatacgtcttttgggggcaacctcggacgagcagtcttccaggcgaaaaagagggttcttgaacctctgggcctggttgaggaacctgtgaagacggctccgggaaaaaagaggccggtagagcactctcctgtggagccagactcctcctcgggaaccggaaaggcgggccagcagcctgcaagaaaaagattgaattttggtcagactggagacgcagactcagtacctgacccccagcctctcggacagccaccagcagccccctctggtctgggaactaatacgatggctacaggcagtggcgcaccaatggcagacaataacgagggcgccgacggagtgggtaattcctcgggaaattggcattgcgattccacatggatgggcgacagagtcatcaccaccagcacccgaacctgggccctgcccacctacaacaaccacctctacaaacaaatttccagccaatcaggagcctcgaacgacaatcactactttggctacagcaccccttgggggtattttgacttcaacagattccactgccacttttcaccacgtgactggcaaagactcatcaacaacaactggggattccgacccaagagactcaacttcaagctctttaacattcaagtcaaagaggtcacgcagaatgacggtacgacgacgattgccaataaccttaccagcacggttcaggtgtttactgactcggagtaccagctcccgtacgtcctcggctcggcgcatcaaggatgcctcccgccgttcccagcagacgtcttcatggtgccacagtatggatacctcaccctgaacaacgggagtcaggcagtaggacgctcttcattttactgcctggagtactttccttctcagatgctgcgtaccggaaacaactttaccttcagctacacttttgaggacgttcctttccacagcagctacgctcacagccagagtctggaccgtctcatgaatcctctcatcgaccagtacctgtattacttgagcagaacaaacactccaagtggaaccaccacgcagtcaaggcttcagttttctcaggccggagcgagtgacattcgggaccagtctaggaactggcttcctggaccctgttaccgccagcagcgagtatcaaagacatctgcggataacaacaacagtgaatactcgtggactggagctaccaagtaccacctcaatggcagagactctctggtgaatccgggcccggccatggcaagccacaaggacgatgaagaaaagttttttcctcagagcggggttctcatctttgggaagcaaggctcagagaaaacaaatgtggacattgaaaaggtcatgattacagacgaagaggaaatcaggacaaccaatcccgtggctacggagcagtatggttctgtatctaccaacctccagagaggcaacagacaagcagctaccgcagatgtcaacacacaaggcgttcttccaggcatggtctggcaggacagagatgtgtaccttcaggggcccatctgggcaaagattccacacacggacggacattttcacccctctcccctcatgggtggattcggacttaaacaccctcctccacagattctcatcaagaacaccccggtacctgcgaatccttcgaccaccttcagtgcggcaaagtttgcttccttcatcacacagtactccacgggacaggtcagcgtggagatcgagtgggagctgcagaaggaaaacagcaaacgctggaatcccgaaattcagtacacttccaactacaacaagtctgttaatgtggactttactgtggacactaatggcgtgtattcagagcctcgccccattggcaccagatacctgactcgtaatctgtaa

SEQ ID NO: 192 - DNA, 4090 bp, synthetic construct
  source 1..4090: mol_type = other DNA
atgccggggttttacgagattgtgattaaggtccccagcgaccttgacgagcatctgcccggcatttctgacagctttgtgaactgggtggccgagaaggaatgggagttgccgccagattctgacatggatctgaatctgattgagcaggcacccctgaccgtggccgagaagctgcagcgcgactttctgacggaatggcgccgtgtgagtaaggccccggaggctcttttctttgtgcaatttgagaagggagagagctacttccacatgcacgtgctcgtggaaaccaccggggtgaaatccatggttttgggacgtttcctgagtcagattcgcgaaaaactgattcagagaatttaccgcgggatcgagccgactttgccaaactggttcgcggtcacaaagaccagaaatggcgccggaggcgggaacaaggtggtggatgagtgctacatccccaattacttgctccccaaaacccagcctgagctccagtgggcgtggactaatatggaacagtatttaagcgcctgtttgaatctcacggagcgtaaacggttggtggcgcagcatctgacgcacgtgtcgcagacgcaggagcagaacaaagagaatcagaatcccaattctgatgcgccggtgatcagatcaaaaacttcagccaggtacatggagctggtcgggtggctcgtggacaaggggattacctcggagaagcagtggatccaggaggaccaggcctcatacatctccttcaatgcggcctccaactcgcggtcccaaatcaaggctgccttggacaatgcgggaaagattatgagcctgactaaaaccgcccccgactacctggtgggccagcagcccgtggaggacatttccagcaatcggatttataaaattttggaactaaacgggtacgatccccaatatgcggcttccgtctttctgggatgggccacgaaaaagttcggcaagaggaacaccatctggctgtttgggcctgcaactaccgggaagaccaacatcgcggaggccatagcccacactgtgcccttctacgggtgcgtaaactggaccaatgagaactttcccttcaacgactgtgtcgacaagatggtgatctggtgggaggaggggaagatgaccgccaaggtcgtggagtcggccaaagccattctcggaggaagcaaggtgcgcgtggaccagaaatgcaagtcctcggcccagatagacccgactcccgtgatcgtcacctccaacaccaacatgtgcgccgtgattgacgggaactcaacgaccttcgaacaccagcagccgttgcaagaccggatgttcaaatttgaactcacccgccgtctggatcatgactttgggaaggtcaccaagcaggaagtcaaagactttttccggtgggcaaaggatcacgtggttgaggtggagcatgaattctacgtcaaaaagggtggagccaagaaaagacccgcccccagtgacgcagatataagtgagcccaaacgggtgcgcgagtcagttgcgcagccatcgacgtcagacgcggaagcttcgatcaactacgcagacaggtaccaaaacaaatgttctcgtcacgtgggcatgaatctgatgctgtttccctgcagacaatgcgagagaatgaatcagaattcaaatatctgcttcactcacggacagaaagactgtttagagtgctttcccgtgtcagaatctcaacccgtttctgtcgtcaaaaaggcgtatcagaaactgtgctacattcatcatatcatgggaaaggtgccagacgcttgcactgcctgcgatctggtcaatgtggatttggatgactgcatctttgaacaataaatgatttaaatcaggtatggctgccgatggttatcttccagattggctcgaggacactctctctgaaggaataagacagtggtggaagctcaaacctggcccaccaccaccaaagcccgcagagcggcataaggacgacagcaggggtcttgtgcttcctgggtacaagtacctcggacccttcaacggactcgacaagggagagccggtcaacgaggcagacgccgcggccctcgagcacgacaaagcctacgaccggcagctcgacagcggagacaacccgtacctcaagtacaaccacgccgacgcggagtttcaggagcgccttaaagaagatacgtcttttgggggcaacctcggacgagcagtcttccaggcgaaaaagagggttcttgaacctctgggcctggttgaggaacctgtgaagacggctccgggaaaaaagaggccggtagagcactctcctgtggagccagactcctcctcgggaaccggaaaggcgggccagcagcctgcaagaaaaagattgaattttggtcagactggagacgcagactcagtacctgacccccagcctctcggacagccaccagcagccccctctggtctgggaactaatacgatggctacaggcagtggcgcaccaatggcagacaataacgagggcgccgacggagtgggtaattcctcgggaaattggcattgcgattccacatggatgggcgacagagtcatcaccaccagcacccgaacctgggccctgcccacctacaacaaccacctctacaaacaaatttccagccaatcaggagcctcgaacgacaatcactactttggctacagcaccccttgggggtattttgacttcaacagattccactgccacttttcaccacgtgactggcaaagactcatcaacaacaactggggattccgacccaagagactcaacttcaagctctttaacattcaagtcaaagaggtcacgcagaatgacggtacgacgacgattgccaataaccttaccagcacggttcaggtgtttactgactcggagtaccagctcccgtacgtcctcggctcggcgcatcaaggatgcctcccgccgttcccagcagacgtcttcatggtgccacagtatggatacctcaccctgaacaacgggagtcaggcagtaggacgctcttcattttactgcctggagtactttccttctcagatgctgcgtaccggaaacaactttaccttcagctacacttttgaggacgttcctttccacagcagctacgctcacagccagagtctggaccgtctcatgaatcctctcatcgaccagtacctgtattacttgagcagaacaaacactccaagtggaaccaccacgcagtcaaggcttcagttttctcaggccggagcgagtgacattcgggaccagtctaggaactggcttcctggaccctgttaccgccagcagcgagtatcaaagacatctgcggataacaacaacagtgaatactcgtggactggagctaccaagtaccacctcaatggcagagactctctggtgaatccgggcccggccatggcaagccacaaggacgatgaagaaaagttttttcctcagagcggggttctcatctttgggaagcaaggctcagagaaaacaaatgtggacattgaaaaggtcatgattacagacgaagaggaaatcaggacaaccaatcccgtggctacggagcagtatggttctgtatctaccaacctccagagaggcaacagacaagcagctaccgcagatgtcaacacacaaggcgttcttccaggcatggtctggcaggacagagatgtgtaccttcaggggcccatctgggcaaagattccacacacggacggacattttcacccctctcccctcatgggtggattcggacttaaacaccctcctccacagattctcatcaagaacaccccggtacctgcgaatccttcgaccaccttcagtgcggcaaagtttgcttccttcatcacacagtactccacgggacaggtcagcgtggagatcgagtgggagctgcagaaggaaaacagcaaacgctggaatcccgaaattcagtacacttccaactacaacaagtctgttaatgtggactttactgtggacactaatggcgtgtattcagagcctcgccccattggcaccagatacctgactcgtaatctgtaa

SEQ ID NO: 193 - DNA, 9816 bp, synthetic construct
  source 1..9816: mol_type = other DNA
atgccggggttttacgagattgtgattaaggtccccagcgaccttgacgagcatctgcccggcatttctgacagctttgtgaactgggtggccgagaaggaatgggagttgccgccagattctgacatggatctgaatctgattgagcaggcacccctgaccgtggccgagaagctgcagcgcgactttctgacggaatggcgccgtgtgagtaaggccccggaggctcttttctttgtgcaatttgagaagggagagagctacttccacatgcacgtgctcgtggaaaccaccggggtgaaatccatggttttgggacgtttcctgagtcagattcgcgaaaaactgattcagagaatttaccgcgggatcgagccgactttgccaaactggttcgcggtcacaaagaccagaaatggcgccggaggcgggaacaaggtggtggatgagtgctacatccccaattacttgctccccaaaacccagcctgagctccagtgggcgtggactaatatggaacagtatttaagcgcctgtttgaatctcacggagcgtaaacggttggtggcgcagcatctgacgcacgtgtcgcagacgcaggagcagaacaaagagaatcagaatcccaattctgatgcgccggtgatcagatcaaaaacttcagccaggtacatggagctggtcgggtggctcgtggacaaggggattacctcggagaagcagtggatccaggaggaccaggcctcatacatctccttcaatgcggcctccaactcgcggtcccaaatcaaggctgccttggacaatgcgggaaagattatgagcctgactaaaaccgcccccgactacctggtgggccagcagcccgtggaggacatttccagcaatcggatttataaaattttggaactaaacgggtacgatccccaatatgcggcttccgtctttctgggatgggccacgaaaaagttcggcaagaggaacaccatctggctgtttgggcctgcaactaccgggaagaccaacatcgcggaggccatagcccacactgtgcccttctacgggtgcgtaaactggaccaatgagaactttcccttcaacgactgtgtcgacaagatggtgatctggtgggaggaggggaagatgaccgccaaggtcgtggagtcggccaaagccattctcggaggaagcaaggtgcgcgtggaccagaaatgcaagtcctcggcccagatagacccgactcccgtgatcgtcacctccaacaccaacatgtgcgccgtgattgacgggaactcaacgaccttcgaacaccagcagccgttgcaagaccggatgttcaaatttgaactcacccgccgtctggatcatgactttgggaaggtcaccaagcaggaagtcaaagactttttccggtgggcaaaggatcacgtggttgaggtggagcatgaattctacgtcaaaaagggtggagccaagaaaagacccgcccccagtgacgcagatataagtgagcccaaacgggtgcgcgagtcagttgcgcagccatcgacgtcagacgcggaagcttcgatcaactacgcagacaggtaccaaaacaaatgttctcgtcacgtgggcatgaatctgatgctgtttccctgcagacaatgcgagagaatgaatcagaattcaaatatctgcttcactcacggacagaaagactgtttagagtgctttcccgtgtcagaatctcaacccgtttctgtcgtcaaaaaggcgtatcagaaactgtgctacattcatcatatcatgggaaaggtgccagacgcttgcactgcctgcgatctggtcaatgtggatttggatgactgcatctttgaacaataaatgatttaaatcaggtatggctgccgatggttatcttccagattggctcgaggacactctctctgaaggaataagacagtggtggaagctcaaacctggcccaccaccaccaaagcccgcagagcggcataaggacgacagcaggggtcttgtgcttcctgggtacaagtacctcggacccttcaacggactcgacaagggagagccggtcaacgaggcagacgccgcggccctcgagcacgacaaagcctacgaccggcagctcgacagcggagacaacccgtacctcaagtacaaccacgccgacgcggagtttcaggagcgccttaaagaagatacgtcttttgggggcaacctcggacgagcagtcttccaggcgaaaaagagggttcttgaacctctgggcctggttgaggaacctgtgaagacggctccgggaaaaaagaggccggtagagcactctcctgtggagccagactcctcctcgggaaccggaaaggcgggccagcagcctgcaagaaaaagattgaattttggtcagactggagacgcagactcagtacctgacccccagcctctcggacagccaccagcagccccctctggtctgggaactaatacgatggctacaggcagtggcgcaccaatggcagacaataacgagggcgccgacggagtgggtaattcctcgggaaattggcattgcgattccacatggatgggcgacagagtcatcaccaccagcacccgaacctgggccctgcccacctacaacaaccacctctacaaacaaatttccagccaatcaggagcctcgaacgacaatcactactttggctacagcaccccttgggggtattttgacttcaacagattccactgccacttttcaccacgtgactggcaaagactcatcaacaacaactggggattccgacccaagagactcaacttcaagctctttaacattcaagtcaaagaggtcacgcagaatgacggtacgacgacgattgccaataaccttaccagcacggttcaggtgtttactgactcggagtaccagctcccgtacgtcctcggctcggcgcatcaaggatgcctcccgccgttcccagcagacgtcttcatggtgccacagtatggatacctcaccctgaacaacgggagtcaggcagtaggacgctcttcattttactgcctggagtactttccttctcagatgctgcgtaccggaaacaactttaccttcagctacacttttgaggacgttcctttccacagcagctacgctcacagccagagtctggaccgtctcatgaatcctctcatcgaccagtacctgtattacttgagcagaacaaacactccaagtggaaccaccacgcagtcaaggcttcagttttctcaggccggagcgagtgacattcgggaccagtctaggaactggcttcctggaccctgttaccgccagcagcgagtatcaaagacatctgcggataacaacaacagtgaatactcgtggactggagctaccaagtaccacctcaatggcagagactctctggtgaatccgggcccggccatggcaagccacaaggacgatgaagaaaagttttttcctcagagcggggttctcatctttgggaagcaaggctcagagaaaacaaatgtggacattgaaaaggtcatgattacagacgaagaggaaatcaggacaaccaatcccgtggctacggagcagtatggttctgtatctaccaacctccagagaggcaacagacaagcagctaccgcagatgtcaacacacaaggcgttcttccaggcatggtctggcaggacagagatgtgtaccttcaggggcccatctgggcaaagattccacacacggacggacattttcacccctctcccctcatgggtggattcggacttaaacaccctcctccacagattctcatcaagaacaccccggtacctgcgaatccttcgaccaccttcagtgcggcaaagtttgcttccttcatcacacagtactccacgggacaggtcagcgtggagatcgagtgggagctgcagaaggaaaacagcaaacgctggaatcccgaaattcagtacacttccaactacaacaagtctgttaatgtggactttactgtggacactaatggcgtgtattcagagcctcgccccattggcaccagatacctgactcgtaatctgtaattgcctgttaatcaataaaccggttgattcgtttcagttgaactttggtctctgcgaagggcgaattcgtttaaacctgcaggactagagccgaattctgcatcgcgatagggataacagggtaataaataatgtactagagacactttcaataaaggcaaatgcttttatttgtacactctcgggtgattatttacccccacccttgccgtctgcgccgtttaaaaatcaaaggggttctgccgcgcatcgctatgcgccactggcagggacacgttgcgatactggtgtttagtgctccacttaaactcaggcacaaccatccgcggcagctcggtgaagttttcactccacaggctgcgcaccatcaccaacgcgtttagcaggtcgggcgccgatatcttgaagtcgcagttggggcctccgccctgcgcgcgcgagttgcgatacacagggttgcagcactggaacactatcagcgccgggtggtgcacgctggccagcacgctcttgtcggagatcagatccgcgtccaggtcctccgcgttgctcagggcgaacggagtcaactttggtagctgccttcccaaaaagggcgcgtgcccaggctttgagttgcactcgcaccgtagtggcatcaaaaggtgaccgtgcccggtctgggcgttaggatacagcgcctgcataaaagccttgatctgcttaaaagccacctgagcctttgcgccttcagagaagaacatgccgcaagacttgccggaaaactgattggccggacaggccgcgtcgtgcacgcagcaccttgcgtcggtgttggagatctgcaccacatttcggccccaccggttcttcacgatcttggccttgctagactgctccttcagcgcgcgctgcccgttttcgctcgtcacatccatttcaatcacgtgctccttatttatcataatgcttccgtgtagacacttaagctcgccttcgatctcagcgcagcggtgcagccacaacgcgcagcccgtgggctcgtgatgcttgtaggtcacctctgcaaacgactgcaggtacgcctgcaggaatcgccccatcatcgtcacaaaggtcttgttgctggtgaaggtcagctgcaacccgcggtgctcctcgttcagccaggtcttgcatacggccgccagagcttccacttggtcaggcagtagtttgaagttcgcctttagatcgttatccacgtggtacttgtccatcagcgcgcgcgcagcctccatgcccttctcccacgcagacacgatcggcacactcagcgggttcatcaccgtaatttcactttccgcttcgctgggctcttcctcttcctcttgcgtccgcataccacgcgccactgggtcgtcttcattcagccgccgcactgtgcgcttacctcctttgccatgcttgattagcaccggtgggttgctgaaacccaccatttgtagcgccacatcttctctttcttcctcgctgtccacgattacctctggtgatggcgggcgctcgggcttgggagaagggcgcttctttttcttcttgggcgcaatggccaaatccgccgccgaggtcgatggccgcgggctgggtgtgcgcggcaccagcgcgtcttgtgatgagtcttcctcgtcctcggactcgatacgccgcctcatccgcttttttgggggcgcccggggaggcggcggcgacggggacggggacgacacgtcctccatggttgggggacgtcgcgccgcaccgcgtccgcgctcgggggtggtttcgcgctgctcctcttcccgactggccatttccttctcctataggcagaaaaagatcgttgaaactcactccggggctgtggacgtcggcttaccttcgcaaatttgtacctgaggactaccacgcccacgagattaggttctacgaagaccaatcccgcccgcctaatgcggagcttaccgcctgcgtcattacccagggccacattcttggccaattgcaagccatcaacaaagcccgccaagagtttctgctacgaaagggacggggggtttacttggacccccagtccggcgaggagctcaacccaatccccccgccgccgcagccctatcagcagcagccgcgggcccttgcttcccaggatggcacccaaaaagaagctgcagctgccgccgccacccacggacgaggaggaatactgggacagtcaggcagaggaggttttggacgaggaggaggaggacatgatggaagactgggagagcctagacgaggaagcttccgaggtcgaagaggtgtcagacgaaacaccgtcaccctcggtcgcattcccctcgccggcgccccagaaatcggcaaccggttccagcatggctacaacctccgctcctcaggcgccgccggcactgcccgttcgccgacccaaccgtagatgggacaccactggaaccagggccggtaagtccaagcagccgccgccgttagcccaagagcaacaacagcgccaaggctaccgctcatggcgcgggcacaagaacgccatagttgcttgcttgcaagactgtgggggcaacatctccttcgcccgccgctttcttctctaccatcacggcgtggccttcccccgtaacatcctgcattactaccgtcatctctacagcccatactgcaccggcggcagcggcagcaacagcagcggccacacagaagcaaaggcgaccggatagcaagactctgacaaagcccaagaaatccacagcggcggcagcagcaggaggaggagcgctgcgtctggcgcccaacgaacccgtatcgacccgcgagcttagaaacaggatttttcccactctgtatgctatatttcaacagagcaggggccaagaacaagagctgaaaataaaaaacaggtctctgcgatccctcacccgcagctgcctgtatcacaaaagcgaagatcagcttcggcgcacgctggaagacgcggaggctctcttcagtaaatactgcgcgctgactcttaaggactagtttcgcgccctttctcaaatttaagcgcgaaaactacgtcatctccagcggccacacccggcgccagcacctgttgtcagcgccattttttagggcggagtaacttgtatgtgttgggaattgtagttttcttaaaatgggaagtgacgtaacgtgggaaaacggaagtgacgatttgaggaagttgtgggttttttggctttcgtttctgggcgtaggttcgcgtgcggttttctgggtgttttttgtggactttaaccgttacgtcattttttagtcctatatatactcgctctgcacttggcccttttttacactgtgactgattgagctggtgccgtgtcgagtggtgtttttttaataggttttcttttttactggtaaggctgactgttatgactacgtccggcgttccatttggcatgacactacgaccaacacgatctcggttgtctcggcgcactccgtacagtagggatcgtctacctccttttgagacagaaacccgcgctaccatactggaggatcatccgctgctgcccgaatgtaacactttgacaatgcacaacgtgagttacgtgcgaggtcttccctgcagtgtgggatttacgctgattcaggaatgggttgttccctgggatatggttctaacgcgggaggagcttgtaatcctgaggaagtgtatgcacgtgtgcctgtgttgtgccaacattgatatcatgacgagcatgatgatccatggttacgagtcctgggctctccactgtcattgttccagtcccggttccctgcagtgtatagccggcgggcaggttttggccagctggtttaggatggtggtggatggcgccatgtttaatcagaggtttatatggtaccgggaggtggtgaattacaacatgccaaaagaggtaatgtttatgtccagcgtgtttatgaggggtcgccacttaatctacctgcgcttgtggtatgatggccacgtgggttctgtggtccccgccatgagctttggatacagcgccttgcactgtgggattttgaacaatattgtggtgctgtgctgcagttactgtgctgatttaagtgagatcagggtgcgctgctgtgcccggaggacaaggcgccttatgctgcgggcggtgcgaatcatcgctgaggagaccactgccatgttgtattcctgcaggacggagcggcggcggcagcagtttattcgcgcgctgctgcagcaccaccgccctatcctgatgcacgattatgactctacccccatgtaggcgtggacttctccttcgccgcccgttaagcaaccgcaagttggacagcagcctgtggctcagcagctggacagcgacatgaacttaagtgagctgcccggggagtttattaatatcactgatgagcgtttggctcgacaggaaaccgtgtggaatataacacctaagaatatgtctgttacccatgatatgatgctttttaaggccagccggggagaaaggactgtgtactctgtgtgttgggagggaggtggcaggttgaatactagggttctgtgagtttgattaaggtacggtgatctgtataagctatgtggtggtggggctatactactgaatgaaaaatgacttgaaattttctgcaattgaaaaataaacacgttgaaacataacacaaacgattctttattcttgggcaatgtatgaaaaagtgtaagaggatgtggcaaatatttcattaatgtagttgtggccagaccagtcccatgaaaatgacatagagtatgcacttggagttgtgtctcctgtttcctgtgtaccgtttagtgtaatggttagtgttacaggtttagttttgtctccgtttaagtaaacttgactgacaatgttacttttggcagttttaccgtgagattttggataagctgataggttaggcataaatccaacagcgtttgtataggctgtcgcccctcctgacgcggtaggaggaggggagggtgccctgcatgtctgccgctgctcttgctcttgccgctgctgaggaggggggcgcatctgccgcagcaccggatgcatctgggaaaagcaaaaaaggggctcgtccctgtttccggaggaatttgcaagcggggtcttgcatgacggggaggcaaacccccgttcgccgcagtccggccggtccgagactcgaaccgggggtcccgcgactcaacccttggaaaataaccctccggctacagggagcgagccacttaatgctttcgctttccagcctaaccgcttacgctgcgcgcggccagtggccaaaaaagctagcgcagcagccgccgcgcctggaaggaagccaaaaggagcactcccccgttgtctgacgtcgcacacctgggttcgacacgcgggcggtaaccgcatggatcacggcggacggccggatacggggctcgaaccccggtcgtccgccatgatacccttgcgaatttatccaccagaccacggaagagtgcccgcttacaggctctccttttgcacggtctagagcgtcaacgattgcgcgcgcctgaccggccagagcgtcccgaccatggagcactttttgccgctgcgcaacatctggaaccgcgtccgcgactttccgcgcgcctccaccaccgccgccggcatcacctggatgtccaggtacatctacggata

SEQ ID NO: 194 - DNA, 12579 bp, synthetic construct
  source 1..12579: mol_type = other DNA
tcgcgcgtttcggtgatgacggtgaaaacctctgacacatgcagctcccggagacggtcacagcttgtctgtaagcggatgccgggagcagacaagcccgtcagggcgcgtcagcgggtgttggcgggtgtcggggctggcttaactatgcggcatcagagcagattgtactgagagtgcaccatatgcggtgtgaaataccgcacagatgcgtaaggagaaaataccgcatcaggcgccattcgccattcaggctgcgcaactgttgggaagggcgatcggtgcgggcctcttcgctattacgccagctggcgaaagggggatgtgctgcaaggcgattaagttgggtaacgccagggttttcccagtcacgacgttgtaaaacgacggccagagaattccgcagggtctccattttgaagcgggaggtttgaacgcgcagccgccatgccggggttttacgagattgtgattaaggtccccagcgaccttgacgagcatctgcccggcatttctgacagctttgtgaactgggtggccgagaaggaatgggagttgccgccagattctgacatggatctgaatctgattgagcaggcacccctgaccgtggccgagaagctgcagcgcgactttctgacggaatggcgccgtgtgagtaaggccccggaggctcttttctttgtgcaatttgagaagggagagagctacttccacatgcacgtgctcgtggaaaccaccggggtgaaatccatggttttgggacgtttcctgagtcagattcgcgaaaaactgattcagagaatttaccgcgggatcgagccgactttgccaaactggttcgcggtcacaaagaccagaaatggcgccggaggcgggaacaaggtggtggatgagtgctacatccccaattacttgctccccaaaacccagcctgagctccagtgggcgtggactaatatggaacagtatttaagcgcctgtttgaatctcacggagcgtaaacggttggtggcgcagcatctgacgcacgtgtcgcagacgcaggagcagaacaaagagaatcagaatcccaattctgatgcgccggtgatcagatcaaaaacttcagccaggtacatggagctggtcgggtggctcgtggacaaggggattacctcggagaagcagtggatccaggaggaccaggcctcatacatctccttcaatgcggcctccaactcgcggtcccaaatcaaggctgccttggacaatgcgggaaagattatgagcctgactaaaaccgcccccgactacctggtgggccagcagcccgtggaggacatttccagcaatcggatttataaaattttggaactaaacgggtacgatccccaatatgcggcttccgtctttctgggatgggccacgaaaaagttcggcaagaggaacaccatctggctgtttgggcctgcaactaccgggaagaccaacatcgcggaggccatagcccacactgtgcccttctacgggtgcgtaaactggaccaatgagaactttcccttcaacgactgtgtcgacaagatggtgatctggtgggaggaggggaagatgaccgccaaggtcgtggagtcggccaaagccattctcggaggaagcaaggtgcgcgtggaccagaaatgcaagtcctcggcccagatagacccgactcccgtgatcgtcacctccaacaccaacatgtgcgccgtgattgacgggaactcaacgaccttcgaacaccagcagccgttgcaagaccggatgttcaaatttgaactcacccgccgtctggatcatgactttgggaaggtcaccaagcaggaagtcaaagactttttccggtgggcaaaggatcacgtggttgaggtggagcatgaattctacgtcaaaaagggtggagccaagaaaagacccgcccccagtgacgcagatataagtgagcccaaacgggtgcgcgagtcagttgcgcagccatcgacgtcagacgcggaagcttcgatcaactacgcagacaggtaccaaaacaaatgttctcgtcacgtgggcatgaatctgatgctgtttccctgcagacaatgcgagagaatgaatcagaattcaaatatctgcttcactcacggacagaaagactgtttagagtgctttcccgtgtcagaatctcaacccgtttctgtcgtcaaaaaggcgtatcagaaactgtgctacattcatcatatcatgggaaaggtgccagacgcttgcactgcctgcgatctggtcaatgtggatttggatgactgcatctttgaacaataaatgatttaaatcaggtatggctgccgatggttatcttccagattggctcgaggacactctctctgaaggaataagacagtggtggaagctcaaacctggcccaccaccaccaaagcccgcagagcggcataaggacgacagcaggggtcttgtgcttcctgggtacaagtacctcggacccttcaacggactcgacaagggagagccggtcaacgaggcagacgccgcggccctcgagcacgacaaagcctacgaccggcagctcgacagcggagacaacccgtacctcaagtacaaccacgccgacgcggagtttcaggagcgccttaaagaagatacgtcttttgggggcaacctcggacgagcagtcttccaggcgaaaaagagggttcttgaacctctgggcctggttgaggaacctgtgaagacggctccgggaaaaaagaggccggtagagcactctcctgtggagccagactcctcctcgggaaccggaaaggcgggccagcagcctgcaagaaaaagattgaattttggtcagactggagacgcagactcagtacctgacccccagcctctcggacagccaccagcagccccctctggtctgggaactaatacgatggctacaggcagtggcgcaccaatggcagacaataacgagggcgccgacggagtgggtaattcctcgggaaattggcattgcgattccacatggatgggcgacagagtcatcaccaccagcacccgaacctgggccctgcccacctacaacaaccacctctacaaacaaatttccagccaatcaggagcctcgaacgacaatcactactttggctacagcaccccttgggggtattttgacttcaacagattccactgccacttttcaccacgtgactggcaaagactcatcaacaacaactggggattccgacccaagagactcaacttcaagctctttaacattcaagtcaaagaggtcacgcagaatgacggtacgacgacgattgccaataaccttaccagcacggttcaggtgtttactgactcggagtaccagctcccgtacgtcctcggctcggcgcatcaaggatgcctcccgccgttcccagcagacgtcttcatggtgccacagtatggatacctcaccctgaacaacgggagtcaggcagtaggacgctcttcattttactgcctggagtactttccttctcagatgctgcgtaccggaaacaactttaccttcagctacacttttgaggacgttcctttccacagcagctacgctcacagccagagtctggaccgtctcatgaatcctctcatcgaccagtacctgtattacttgagcagaacaaacactccaagtggaaccaccacgcagtcaaggcttcagttttctcaggccggagcgagtgacattcgggaccagtctaggaactggcttcctggaccctgttaccgccagcagcgagtatcaaagacatctgcggataacaacaacagtgaatactcgtggactggagctaccaagtaccacctcaatggcagagactctctggtgaatccgggcccggccatggcaagccacaaggacgatgaagaaaagttttttcctcagagcggggttctcatctttgggaagcaaggctcagagaaaacaaatgtggacattgaaaaggtcatgattacagacgaagaggaaatcaggacaaccaatcccgtggctacggagcagtatggttctgtatctaccaacctccagagaggcaacagacaagcagctaccgcagatgtcaacacacaaggcgttcttccaggcatggtctggcaggacagagatgtgtaccttcaggggcccatctgggcaaagattccacacacggacggacattttcacccctctcccctcatgggtggattcggacttaaacaccctcctccacagattctcatcaagaacaccccggtacctgcgaatccttcgaccaccttcagtgcggcaaagtttgcttccttcatcacacagtactccacgggacaggtcagcgtggagatcgagtgggagctgcagaaggaaaacagcaaacgctggaatcccgaaattcagtacacttccaactacaacaagtctgttaatgtggactttactgtggacactaatggcgtgtattcagagcctcgccccattggcaccagatacctgactcgtaatctgtaattgcctgttaatcaataaaccggttgattcgtttcagttgaactttggtctctgcgaagggcgaattcgtttaaacctgcaggactagagccgaattctgcatcgcgatagggataacagggtaataaataatgtactagagacactttcaataaaggcaaatgcttttatttgtacactctcgggtgattatttacccccacccttgccgtctgcgccgtttaaaaatcaaaggggttctgccgcgcatcgctatgcgccactggcagggacacgttgcgatactggtgtttagtgctccacttaaactcaggcacaaccatccgcggcagctcggtgaagttttcactccacaggctgcgcaccatcaccaacgcgtttagcaggtcgggcgccgatatcttgaagtcgcagttggggcctccgccctgcgcgcgcgagttgcgatacacagggttgcagcactggaacactatcagcgccgggtggtgcacgctggccagcacgctcttgtcggagatcagatccgcgtccaggtcctccgcgttgctcagggcgaacggagtcaactttggtagctgccttcccaaaaagggcgcgtgcccaggctttgagttgcactcgcaccgtagtggcatcaaaaggtgaccgtgcccggtctgggcgttaggatacagcgcctgcataaaagccttgatctgcttaaaagccacctgagcctttgcgccttcagagaagaacatgccgcaagacttgccggaaaactgattggccggacaggccgcgtcgtgcacgcagcaccttgcgtcggtgttggagatctgcaccacatttcggccccaccggttcttcacgatcttggccttgctagactgctccttcagcgcgcgctgcccgttttcgctcgtcacatccatttcaatcacgtgctccttatttatcataatgcttccgtgtagacacttaagctcgccttcgatctcagcgcagcggtgcagccacaacgcgcagcccgtgggctcgtgatgcttgtaggtcacctctgcaaacgactgcaggtacgcctgcaggaatcgccccatcatcgtcacaaaggtcttgttgctggtgaaggtcagctgcaacccgcggtgctcctcgttcagccaggtcttgcatacggccgccagagcttccacttggtcaggcagtagtttgaagttcgcctttagatcgttatccacgtggtacttgtccatcagcgcgcgcgcagcctccatgcccttctcccacgcagacacgatcggcacactcagcgggttcatcaccgtaatttcactttccgcttcgctgggctcttcctcttcctcttgcgtccgcataccacgcgccactgggtcgtcttcattcagccgccgcactgtgcgcttacctcctttgccatgcttgattagcaccggtgggttgctgaaacccaccatttgtagcgccacatcttctctttcttcctcgctgtccacgattacctctggtgatggcgggcgctcgggcttgggagaagggcgcttctttttcttcttgggcgcaatggccaaatccgccgccgaggtcgatggccgcgggctgggtgtgcgcggcaccagcgcgtcttgtgatgagtcttcctcgtcctcggactcgatacgccgcctcatccgcttttttgggggcgcccggggaggcggcggcgacggggacggggacgacacgtcctccatggttgggggacgtcgcgccgcaccgcgtccgcgctcgggggtggtttcgcgctgctcctcttcccgactggccatttccttctcctataggcagaaaaagatcgttgaaactcactccggggctgtggacgtcggcttaccttcgcaaatttgtacctgaggactaccacgcccacgagattaggttctacgaagaccaatcccgcccgcctaatgcggagcttaccgcctgcgtcattacccagggccacattcttggccaattgcaagccatcaacaaagcccgccaagagtttctgctacgaaagggacggggggtttacttggacccccagtccggcgaggagctcaacccaatccccccgccgccgcagccctatcagcagcagccgcgggcccttgcttcccaggatggcacccaaaaagaagctgcagctgccgccgccacccacggacgaggaggaatactgggacagtcaggcagaggaggttttggacgaggaggaggaggacatgatggaagactgggagagcctagacgaggaagcttccgaggtcgaagaggtgtcagacgaaacaccgtcaccctcggtcgcattcccctcgccggcgccccagaaatcggcaaccggttccagcatggctacaacctccgctcctcaggcgccgccggcactgcccgttcgccgacccaaccgtagatgggacaccactggaaccagggccggtaagtccaagcagccgccgccgttagcccaagagcaacaacagcgccaaggctaccgctcatggcgcgggcacaagaacgccatagttgcttgcttgcaagactgtgggggcaacatctccttcgcccgccgctttcttctctaccatcacggcgtggccttcccccgtaacatcctgcattactaccgtcatctctacagcccatactgcaccggcggcagcggcagcaacagcagcggccacacagaagcaaaggcgaccggatagcaagactctgacaaagcccaagaaatccacagcggcggcagcagcaggaggaggagcgctgcgtctggcgcccaacgaacccgtatcgacccgcgagcttagaaacaggatttttcccactctgtatgctatatttcaacagagcaggggccaagaacaagagctgaaaataaaaaacaggtctctgcgatccctcacccgcagctgcctgtatcacaaaagcgaagatcagcttcggcgcacgctggaagacgcggaggctctcttcagtaaatactgcgcgctgactcttaaggactagtttcgcgccctttctcaaatttaagcgcgaaaactacgtcatctccagcggccacacccggcgccagcacctgttgtcagcgccattttttagggcggagtaacttgtatgtgttgggaattgtagttttcttaaaatgggaagtgacgtaacgtgggaaaacggaagtgacgatttgaggaagttgtgggttttttggctttcgtttctgggcgtaggttcgcgtgcggttttctgggtgttttttgtggactttaaccgttacgtcattttttagtcctatatatactcgctctgcacttggcccttttttacactgtgactgattgagctggtgccgtgtcgagtggtgtttttttaataggttttcttttttactggtaaggctgactgttatgactacgtccggcgttccatttggcatgacactacgaccaacacgatctcggttgtctcggcgcactccgtacagtagggatcgtctacctccttttgagacagaaacccgcgctaccatactggaggatcatccgctgctgcccgaatgtaacactttgacaatgcacaacgtgagttacgtgcgaggtcttccctgcagtgtgggatttacgctgattcaggaatgggttgttccctgggatatggttctaacgcgggaggagcttgtaatcctgaggaagtgtatgcacgtgtgcctgtgttgtgccaacattgatatcatgacgagcatgatgatccatggttacgagtcctgggctctccactgtcattgttccagtcccggttccctgcagtgtatagccggcgggcaggttttggccagctggtttaggatggtggtggatggcgccatgtttaatcagaggtttatatggtaccgggaggtggtgaattacaacatgccaaaagaggtaatgtttatgtccagcgtgtttatgaggggtcgccacttaatctacctgcgcttgtggtatgatggccacgtgggttctgtggtccccgccatgagctttggatacagcgccttgcactgtgggattttgaacaatattgtggtgctgtgctgcagttactgtgctgatttaagtgagatcagggtgcgctgctgtgcccggaggacaaggcgccttatgctgcgggcggtgcgaatcatcgctgaggagaccactgccatgttgtattcctgcaggacggagcggcggcggcagcagtttattcgcgcgctgctgcagcaccaccgccctatcctgatgcacgattatgactctacccccatgtaggcgtggacttctccttcgccgcccgttaagcaaccgcaagttggacagcagcctgtggctcagcagctggacagcgacatgaacttaagtgagctgcccggggagtttattaatatcactgatgagcgtttggctcgacaggaaaccgtgtggaatataacacctaagaatatgtctgttacccatgatatgatgctttttaaggccagccggggagaaaggactgtgtactctgtgtgttgggagggaggtggcaggttgaatactagggttctgtgagtttgattaaggtacggtgatctgtataagctatgtggtggtggggctatactactgaatgaaaaatgacttgaaattttctgcaattgaaaaataaacacgttgaaacataacacaaacgattctttattcttgggcaatgtatgaaaaagtgtaagaggatgtggcaaatatttcattaatgtagttgtggccagaccagtcccatgaaaatgacatagagtatgcacttggagttgtgtctcctgtttcctgtgtaccgtttagtgtaatggttagtgttacaggtttagttttgtctccgtttaagtaaacttgactgacaatgttacttttggcagttttaccgtgagattttggataagctgataggttaggcataaatccaacagcgtttgtataggctgtcgcccctcctgacgcggtaggaggaggggagggtgccctgcatgtctgccgctgctcttgctcttgccgctgctgaggaggggggcgcatctgccgcagcaccggatgcatctgggaaaagcaaaaaaggggctcgtccctgtttccggaggaatttgcaagcggggtcttgcatgacggggaggcaaacccccgttcgccgcagtccggccggtccgagactcgaaccgggggtcccgcgactcaacccttggaaaataaccctccggctacagggagcgagccacttaatgctttcgctttccagcctaaccgcttacgctgcgcgcggccagtggccaaaaaagctagcgcagcagccgccgcgcctggaaggaagccaaaaggagcactcccccgttgtctgacgtcgcacacctgggttcgacacgcgggcggtaaccgcatggatcacggcggacggccggatacggggctcgaaccccggtcgtccgccatgatacccttgcgaatttatccaccagaccacggaagagtgcccgcttacaggctctccttttgcacggtctagagcgtcaacgattgcgcgcgcctgaccggccagagcgtcccgaccatggagcactttttgccgctgcgcaacatctggaaccgcgtccgcgactttccgcgcgcctccaccaccgccgccggcatcacctggatgtccaggtacatctacggatatggcaaacagctattatgggtattatgggtgcggccgcggatcccgggcccgtcgactgcagaggcctgcatgcaagcttggtgtaatcatggtcatagctgtttcctgtgtgaaattgttatccgctcacaattccacacaacatacgagccggaagcataaagtgtaaagcctggggtgcctaatgagtgagctaactcacattaattgcgttgcgctcactgcccgctttccagtcgggaaacctgtcgtgccagctgcattaatgaatcggccaacgcgcggggagaggcggtttgcgtattgggcgctcttccgcttcctcgctcactgactcgctgcgctcggtcgttcggctgcggcgagcggtatcagctcactcaaaggcggtaatacggttatccacagaatcaggggataacgcaggaaagaacatgtgagcaaaaggccagcaaaaggccaggaaccgtaaaaaggccgcgttgctggcgtttttccataggctccgcccccctgacgagcatcacaaaaatcgacgctcaagtcagaggtggcgaaacccgacaggactataaagataccaggcgtttccccctggaagctccctcgtgcgctctcctgttccgaccctgccgcttaccggatacctgtccgcctttctcccttcgggaagcgtggcgctttctcatagctcacgctgtaggtatctcagttcggtgtaggtcgttcgctccaagctgggctgtgtgcacgaaccccccgttcagcccgaccgctgcgccttatccggtaactatcgtcttgagtccaacccggtaagacacgacttatcgccactggcagcagccactggtaacaggattagcagagcgaggtatgtaggcggtgctacagagttcttgaagtggtggcctaactacggctacactagaagaacagtatttggtatctgcgctctgctgaagccagttaccttcggaaaaagagttggtagctcttgatccggcaaacaaaccaccgctggtagcggtggtttttttgtttgcaagcagcagattacgcgcagaaaaaaaggatctcaagaagatcctttgatcttttctacggggtctgacgctcagtggaacgaaaactcacgttaagggattttggtcatgagattatcaaaaaggatcttcacctagaaggtcctgtattagaggtcacgtgagtgttttgcgacattttgcgacaccatgtggtcacgctgggtatttaagcccgagtgagcacgcagggtctccattttgaagcgggaggtttgaacgcgcagccgccatccttttaaattaaaaatgaagttttaaatcaagcccaatctgaataatgttacaaccaattaaccaattctgattagaaaaactcatcgagcatcaaatgaaactgcaatttattcatatcaggattatcaataccatatttttgaaaaagccgtttctgtaatgaaggagaaaactcaccgaggcagttccataggatggcaagatcctggtatcggtctgcgattccgactcgtccaacatcaatacaacctattaatttcccctcgtcaaaaataaggttatcaagtgagaaatcaccatgagtgacgactgaatccggtgagaatggcaaaagtttatgcatttctttccagacttgttcaacaggccagccattacgctcgtcatcaaaatcactcgcatcaaccaaaccgttattcattcgtgattgcgcctgagcgagacgaaatacgcgatcgctgttaaaaggacaattacaaacaggaatcgaatgcaaccggcgcaggaacactgccagcgcatcaacaatattttcacctgaatcaggatattcttctaatacctggaatgctgtttttccggggatcgcagtggtgagtaaccatgcatcatcaggagtacggataaaatgcttgatggtcggaagaggcataaattccgtcagccagtttagtctgaccatctcatctgtaacatcattggcaacgctacctttgccatgtttcagaaacaactctggcgcatcgggcttcccatacaagcgatagattgtcgcacctgattgcccgacattatcgcgagcccatttatacccatataaatcagcatccatgttggaatttaatcgcggcctcgacgtttcccgttgaatatggctcataacaccccttgtattactgtttatgtaagcagacagttttattgttcatgatgatatatttttatcttgtgcaatgtaacatcagagattttgagacacgggccagagctgca

SEQ ID NO: 195 - DNA, 5505 bp, synthetic construct; identical to SEQ ID NO: 106
  source 1..5505: mol_type = other DNA

SEQ ID NO: 196 - DNA, 2217 bp, synthetic construct
  source 1..2217: mol_type = other DNA
atggctgccgatggttatcttccagattggctcgaggacaacctctctgagggcattcgcgagtggtgggcgctgaaacctggagccccgaagcccaaagccaaccagcaaaagcaggacgacggccggggtctggtgcttcctggctacaagtacctcggacccttcaacggactcgacaagggggagcccgtgaacgcggcggacgcagcggccctcgagcacgacaaggcctacgaccagcagctgcaggcgggtgacaatccgtacctgcggtataaccacgccgacgccgagtttcaggagcgtctgcaagaagatacgtcttttgggggcaacctcgggcgagcagtcttccaggccaagaagcgggttctcgaacctctcggtctggttgaggaaggcgctaagacggctcctggaaagaagagaccggtagagccatcaccccagcgttctccagactcctctacgggcatcggcaagaaaggccaacagcccgccagaaaaagactcaattttggtcagactggcgactcagagtcagttccagaccctcaacctctcggagaacctccagcagcgccctctggtgtgggacctaatacaatggctgcaggcggtggcgcaccaatggcagacaataacgaaggcgccgacggagtgggtagttcctcgggaaattggcattgcgattccacatggctgggcgacagagtcatcaccaccagcacccgaacctgggccctgcccacctacaacaaccacctctacaagcaaatctccaacgggacatcgggaggagccaccaacgacaacacctacttcggctacagcaccccctgggggtattttgactttaacagattccactgccacttttcaccacgtgactggcagcgactcatcaacaacaactggggattccggcccaagagactcagcttcaagctcttcaacatccaggtcaaggaggtcacgcagaatgaaggcaccaagaccatcgccaataacctcaccagcaccatccaggtgtttacggactcggagtaccagctgccgtacgttctcggctctgcccaccagggctgcctgcctccgttcccggcggacgtgttcatgattccccagtacggctacctaacactcaacaacggtagtcaggccgtgggacgctcctccttctactgcctggaatactttccttcgcagatgctgagaaccggcaacaacttccagtttacttacaccttcgaggacgtgcctttccacagcagctacgcccacagccagagcttggaccggctgatgaatcctctgattgaccagtacctgtactacttgtctcggactcaaacaacaggaggcacggcaaatacgcagactctgggcttcagccaaggtgggcctaatacaatggccaatcaggcaaagaactggctgccaggaccctgttaccgccaacaacgcgtctcaacgacaaccgggcaaaacaacaatagcaactttgcctggactgctgggaccaaataccatctgaatggaagaaattcattggctaatcctggcatcgctatggcaacacacaaagacgacgaggagcgtttttttcccagtaacgggatcctgatttttggcaaacaaaatgctgccagagacaatgcggattacagcgatgtcatgctcaccagcgaggaagaaatcaaaaccactaaccctgtggctacagaggaatacggtatcgtggcagataacttgcagcagcaaaacacggctcctcaaattggaactgtcaacagccagggggccttacccggtatggtctggcagaaccgggacgtgtacctgcagggtcccatctgggccaagattcctcacacggacggcaacttccacccgtctccgctgatgggcggctttggcctgaaacatcctccgcctcagatcctgatcaagaacacgcctgtacctgcggatcctccgaccaccttcaaccagtcaaagctgaactctttcatcacgcaatacagcaccggacaggtcagcgtggaaattgaatgggagctgcagaaggaaaacagcaagcgctggaaccccgagatccagtacacctccaactactacaaatctacaagtgtggactttgctgttaatacagaaggcgtgtactctgaaccccgccccattggcacccgttacctcacccgtaatctgtaa

SEQ ID NO: 197 - DNA, 9825 bp, synthetic construct
  source 1..9825: mol_type = other DNA
atgccggggttttacgagattgtgattaaggtccccagcgaccttgacgagcatctgcccggcatttctgacagctttgtgaactgggtggccgagaaggaatgggagttgccgccagattctgacatggatctgaatctgattgagcaggcacccctgaccgtggccgagaagctgcagcgcgactttctgacggaatggcgccgtgtgagtaaggccccggaggctcttttctttgtgcaatttgagaagggagagagctacttccacatgcacgtgctcgtggaaaccaccggggtgaaatccatggttttgggacgtttcctgagtcagattcgcgaaaaactgattcagagaatttaccgcgggatcgagccgactttgccaaactggttcgcggtcacaaagaccagaaatggcgccggaggcgggaacaaggtggtggatgagtgctacatccccaattacttgctccccaaaacccagcctgagctccagtgggcgtggactaatatggaacagtatttaagcgcctgtttgaatctcacggagcgtaaacggttggtggcgcagcatctgacgcacgtgtcgcagacgcaggagcagaacaaagagaatcagaatcccaattctgatgcgccggtgatcagatcaaaaacttcagccaggtacatggagctggtcgggtggctcgtggacaaggggattacctcggagaagcagtggatccaggaggaccaggcctcatacatctccttcaatgcggcctccaactcgcggtcccaaatcaaggctgccttggacaatgcgggaaagattatgagcctgactaaaaccgcccccgactacctggtgggccagcagcccgtggaggacatttccagcaatcggatttataaaattttggaactaaacgggtacgatccccaatatgcggcttccgtctttctgggatgggccacgaaaaagttcggcaagaggaacaccatctggctgtttgggcctgcaactaccgggaagaccaacatcgcggaggccatagcccacactgtgcccttctacgggtgcgtaaactggaccaatgagaactttcccttcaacgactgtgtcgacaagatggtgatctggtgggaggaggggaagatgaccgccaaggtcgtggagtcggccaaagccattctcggaggaagcaaggtgcgcgtggaccagaaatgcaagtcctcggcccagatagacccgactcccgtgatcgtcacctccaacaccaacatgtgcgccgtgattgacgggaactcaacgaccttcgaacaccagcagccgttgcaagaccggatgttcaaatttgaactcacccgccgtctggatcatgactttgggaaggtcaccaagcaggaagtcaaagactttttccggtgggcaaaggatcacgtggttgaggtggagcatgaattctacgtcaaaaagggtggagccaagaaaagacccgcccccagtgacgcagatataagtgagcccaaacgggtgcgcgagtcagttgcgcagccatcgacgtcagacgcggaagcttcgatcaactacgcagacaggtaccaaaacaaatgttctcgtcacgtgggcatgaatctgatgctgtttccctgcagacaatgcgagagaatgaatcagaattcaaatatctgcttcactcacggacagaaagactgtttagagtgctttcccgtgtcagaatctcaacccgtttctgtcgtcaaaaaggcgtatcagaaactgtgctacattcatcatatcatgggaaaggtgccagacgcttgcactgcctgcgatctggtcaatgtggatttggatgactgcatctttgaacaataaatgatttaaatcaggtatggctgccgatggttatcttccagattggctcgaggacaacctctctgagggcattcgcgagtggtgggcgctgaaacctggagccccgaagcccaaagccaaccagcaaaagcaggacgacggccggggtctggtgcttcctggctacaagtacctcggacccttcaacggactcgacaagggggagcccgtgaacgcggcggacgcagcggccctcgagcacgacaaggcctacgaccagcagctgcaggcgggtgacaatccgtacctgcggtataaccacgccgacgccgagtttcaggagcgtctgcaagaagatacgtcttttgggggcaacctcgggcgagcagtcttccaggccaagaagcgggttctcgaacctctcggtctggttgaggaaggcgctaagacggctcctggaaagaagagaccggtagagccatcaccccagcgttctccagactcctctacgggcatcggcaagaaaggccaacagcccgccagaaaaagactcaattttggtcagactggcgactcagagtcagttccagaccctcaacctctcggagaacctccagcagcgccctctggtgtgggacctaatacaatggctgcaggcggtggcgcaccaatggcagacaataacgaaggcgccgacggagtgggtagttcctcgggaaattggcattgcgattccacatggctgggcgacagagtcatcaccaccagcacccgaacctgggccctgcccacctacaacaaccacctctacaagcaaatctccaacgggacatcgggaggagccaccaacgacaacacctacttcggctacagcaccccctgggggtattttgactttaacagattccactgccacttttcaccacgtgactggcagcgactcatcaacaacaactggggattccggcccaagagactcagcttcaagctcttcaacatccaggtcaaggaggtcacgcagaatgaaggcaccaagaccatcgccaataacctcaccagcaccatccaggtgtttacggactcggagtaccagctgccgtacgttctcggctctgcccaccagggctgcctgcctccgttcccggcggacgtgttcatgattccccagtacggctacctaacactcaacaacggtagtcaggccgtgggacgctcctccttctactgcctggaatactttccttcgcagatgctgagaaccggcaacaacttccagtttacttacaccttcgaggacgtgcctttccacagcagctacgcccacagccagagcttggaccggctgatgaatcctctgattgaccagtacctgtactacttgtctcggactcaaacaacaggaggcacggcaaatacgcagactctgggcttcagccaaggtgggcctaatacaatggccaatcaggcaaagaactggctgccaggaccctgttaccgccaacaacgcgtctcaacgacaaccgggcaaaacaacaatagcaactttgcctggactgctgggaccaaataccatctgaatggaagaaattcattggctaatcctggcatcgctatggcaacacacaaagacgacgaggagcgtttttttcccagtaacgggatcctgatttttggcaaacaaaatgctgccagagacaatgcggattacagcgatgtcatgctcaccagcgaggaagaaatcaaaaccactaaccctgtggctacagaggaatacggtatcgtggcagataacttgcagcagcaaaacacggctcctcaaattggaactgtcaacagccagggggccttacccggtatggtctggcagaaccgggacgtgtacctgcagggtcccatctgggccaagattcctcacacggacggcaacttccacccgtctccgctgatgggcggctttggcctgaaacatcctccgcctcagatcctgatcaagaacacgcctgtacctgcggatcctccgaccaccttcaaccagtcaaagctgaactctttcatcacgcaatacagcaccggacaggtcagcgtggaaattgaatgggagctgcagaaggaaaacagcaagcgctggaaccccgagatccagtacacctccaactactacaaatctacaagtgtggactttgctgttaatacagaaggcgtgtactctgaaccccgccccattggcacccgttacctcacccgtaatctgtaattgcctgttaatcaataaaccggttgattcgtttcagttgaactttggtctctgcgaagggcgaattcgtttaaacctgcaggactagagccgaattctgcatcgcgatagggataacagggtaataaataatgtactagagacactttcaataaaggcaaatgcttttatttgtacactctcgggtgattatttacccccacccttgccgtctgcgccgttcagaagtcgaaggggttctgtctggcatcggaatgggccacgggcagagacacgttccggtactggtgcttggtggaccacttgaactcaggcacgaccattctaggcagctctgtgaagttctcgctccacaggctccgcaccatcaccagggcgttcagcaggtcaggggcgctgattttgaagtcgcagttaggtccgccgccctgggctctgctgtttctgtacacagggttgcagcactggaacacaataagagcagggtggtgcacgctggccagcacagacttgtcgctgatcaggtcggcgtcgagatcctcggcgttagacaaggcaaaaggggtcagcttgggcagctggcggcccaggaaaggggcgtggccgggcttgctattgcactcgcatctcagaggcatcagcaggtggccgtggccggtctgggcgttggggtacagggcctgcataaaggccttgatctgtttgaaggccacttgggccttggcgccttcggagaagaacatgccgcagcttttgccgctgaactggttggcggggcaggcggcgtcgtgcacacaacaccgggcgtcggtattgctgatctgcaccacgtttctgccccatctgttcttcacgatcttggccttgctgctctgctctttcagggccctctggccgttctcagaggtgacgtccatctcgatcacatgttccttgttgatcatgatgctgccgtgcagacacttcagctcgccctcgatttccgcgcatctgtgcagccacagggcacaaccggtaggctcgtggtgcttgtatgtcacctcagcaaaagattgcaggtaggcttgcaggaatctgcccatcatggtcacgaaggtcttgttggaggtaaaagtcagctgcagtcctctgtgttcctcgttcagccatgtcttgcacacggcggccagagcctcgacctgatctggcagcagcttgaaattagccttcaggtcgttgtccacgtgatacttatccatcagtgctctggcggcttccatgcccttctcccaggcggaaacgatgggcacgctcagggggttcatcacggtgatctcgctttcagcttctgaaggttcctcctcttcctcctgtgttctcatgccccgagccacggggtcgtcctcattcagtctccgcacggttctttttcctccctttccgtgcttaatcagtacaggaggattagagaagcccaccatctggagggcgacgtcctccctttcttcttcgctatccacgatcacttctgggctggggggccgttcaggctttgggctaggccgtttttttttcttcttaggggcgatagccagatcagcggcgcttgtagagggccgaggactaggggttctaggcacgagggcgtcctggctgctgtcctcctcatcctcgctctcgatccgtctccgcattctcttcttagggggggcccgcggagggggagggctagggctaggggacgacacatcttccatggttggaggtctgcgagcagcgcctctgcctctctctggtgttgtctcgcgctgttcttcctctctagaggccatttccttctcctataggcagaaaaagatcgttgaaactcactccggggctgtggacgtcggcttaccttcgcaaatttgtacctgaggactaccacgcccacgagattaggttctacgaagaccaatcccgcccgcctaatgcggagcttaccgcctgcgtcattacccagggccacattcttggccaattgcaagccatcaacaaagcccgccaagagtttctgctacgaaagggacggggggtttacttggacccccagtccggcgaggagctcaacccaatccccccgccgccgcagccctatcagcagcagccgcgggcccttgcttcccaggatggcacccaaaaagaagctgcagctgccgccgccacccacggacgaggaggaatactgggacagtcaggcagaggaggttttggacgaggaggaggaggacatgatggaagactgggagagcctagacgaggaagcttccgaggtcgaagaggtgtcagacgaaacaccgtcaccctcggtcgcattcccctcgccggcgccccagaaatcggcaaccggttccagcatggctacaacctccgctcctcaggcgccgccggcactgcccgttcgccgacccaaccgtagatgggacaccactggaaccagggccggtaagtccaagcagccgccgccgttagcccaagagcaacaacagcgccaaggctaccgctcatggcgcgggcacaagaacgccatagttgcttgcttgcaagactgtgggggcaacatctccttcgcccgccgctttcttctctaccatcacggcgtggccttcccccgtaacatcctgcattactaccgtcatctctacagcccatactgcaccggcggcagcggcagcaacagcagcggccacacagaagcaaaggcgaccggatagcaagactctgacaaagcccaagaaatccacagcggcggcagcagcaggaggaggagcgctgcgtctggcgcccaacgaacccgtatcgacccgcgagcttagaaacaggatttttcccactctgtatgctatatttcaacagagcaggggccaagaacaagagctgaaaataaaaaacaggtctctgcgatccctcacccgcagctgcctgtatcacaaaagcgaagatcagcttcggcgcacgctggaagacgcggaggctctcttcagtaaatactgcgcgctgactcttaaggactagtttcgcgccctttctcaaatttaagcgcgaaaactacgtcatctccagcggccacacccggcgccagcacctgttgtcagcgccattttttagggcggagtaacttgtatgtgttgggaattgtagttttcttaaaatgggaagtgacgtaacgtgggaaaacggaagtgacgatttgaggaagttgtgggttttttggctttcgtttctgggcgtaggttcgcgtgcggttttctgggtgttttttgtggactttaaccgttacgtcattttttagtcctatatatactcgctctgcacttggcccttttttacactgtgactgattgagctggtgccgtgtcgagtggtgtttttttaataggttttcttttttactggtaaggctgactgttatgactacgtccggcgttccatttggcatgacactacgaccaacacgatctcggttgtctcggcgcactccgtacagtagggatcgtctacctccttttgagacagaaacccgcgctaccatactggaggatcatccgctgctgcccgaatgtaacactttgacaatgcacaacgtgagttacgtgcgaggtcttccctgcagtgtgggatttacgctgattcaggaatgggttgttccctgggatatggttctaacgcgggaggagcttgtaatcctgaggaagtgtatgcacgtgtgcctgtgttgtgccaacattgatatcatgacgagcatgatgatccatggttacgagtcctgggctctccactgtcattgttccagtcccggttccctgcagtgtatagccggcgggcaggttttggccagctggtttaggatggtggtggatggcgccatgtttaatcagaggtttatatggtaccgggaggtggtgaattacaacatgccaaaagaggtaatgtttatgtccagcgtgtttatgaggggtcgccacttaatctacctgcgcttgtggtatgatggccacgtgggttctgtggtccccgccatgagctttggatacagcgccttgcactgtgggattttgaacaatattgtggtgctgtgctgcagttactgtgctgatttaagtgagatcagggtgcgctgctgtgcccggaggacaaggcgccttatgctgcgggcggtgcgaatcatcgctgaggagaccactgccatgttgtattcctgcaggacggagcggcggcggcagcagtttattcgcgcgctgctgcagcaccaccgccctatcctgatgcacgattatgactctacccccatgtaggcgtggacttctccttcgccgcccgttaagcaaccgcaagttggacagcagcctgtggctcagcagctggacagcgacatgaacttaagtgagctgcccggggagtttattaatatcactgatgagcgtttggctcgacaggaaaccgtgtggaatataacacctaagaatatgtctgttacccatgatatgatgctttttaaggccagccggggagaaaggactgtgtactctgtgtgttgggagggaggtggcaggttgaatactagggttctgtgagtttgattaaggtacggtgatctgtataagctatgtggtggtggggctatactactgaatgaaaaatgacttgaaattttctgcaattgaaaaataaacacgttgaaacataacacaaacgattctttattcttgggcaatgtatgaaaaagtgtaagaggatgtggcaaatatttcattaatgtagttgtggccagaccagtcccatgaaaatgacatagagtatgcacttggagttgtgtctcctgtttcctgtgtaccgtttagtgtaatggttagtgttacaggtttagttttgtctccgtttaagtaaacttgactgacaatgttacttttggcagttttaccgtgagattttggataagctgataggttaggcataaatccaacagcgtttgtataggctgtcgcccctcctgacgcggtaggaggaggggagggtgccctgcatgtctgccgctgctcttgctcttgccgctgctgaggaggggggcgcatctgccgcagcaccggatgcatctgggaaaagcaaaaaaggggctcgtccctgtttccggaggaatttgcaagcggggtcttgcatgacggggaggcaaacccccgttcgccgcagtccggccggtccgagactcgaaccgggggtcccgcgactcaacccttggaaaataaccctccggctacagggagcgagccacttaatgctttcgctttccagcctaaccgcttacgctgcgcgcggccagtggccaaaaaagctagcgcagcagccgccgcgcctggaaggaagccaaaaggagcactcccccgttgtctgacgtcgcacacctgggttcgacacgcgggcggtaaccgcatggatcacggcggacggccggatacggggctcgaaccccggtcgtccgccatgatacccttgcgaatttatccaccagaccacggaagagtgcccgcttacaggctctccttttgcacggtctagagcgtcaacgattgcgcgcgcctgaccggccagagcgtcccgaccatggagcactttttgccgctgcgcaacatctggaaccgcgtccgcgactttccgcgcgcctccaccaccgccgccggcatcacctggatgtccaggtacatctacggata

SEQ ID NO: 198 - DNA, 9825 bp, synthetic construct; identical to SEQ ID NO: 197
  source 1..9825: mol_type = other DNA

SEQ ID NO: 199 - DNA, 12588 bp, synthetic construct
  source 1..12588: mol_type = other DNA
tcgcgcgtttcggtgatgacggtgaaaacctctgacacatgcagctcccggagacggtcacagcttgtctgtaagcggatgccgggagcagacaagcccgtcagggcgcgtcagcgggtgttggcgggtgtcggggctggcttaactatgcggcatcagagcagattgtactgagagtgcaccatatgcggtgtgaaataccgcacagatgcgtaaggagaaaataccgcatcaggcgccattcgccattcaggctgcgcaactgttgggaagggcgatcggtgcgggcctcttcgctattacgccagctggcgaaagggggatgtgctgcaaggcgattaagttgggtaacgccagggttttcccagtcacgacgttgtaaaacgacggccagagaattccgcagggtctccattttgaagcgggaggtttgaacgcgcagccgccatgccggggttttacgagattgtgattaaggtccccagcgaccttgacgagcatctgcccggcatttctgacagctttgtgaactgggtggccgagaaggaatgggagttgccgccagattctgacatggatctgaatctgattgagcaggcacccctgaccgtggccgagaagctgcagcgcgactttctgacggaatggcgccgtgtgagtaaggccccggaggctcttttctttgtgcaatttgagaagggagagagctacttccacatgcacgtgctcgtggaaaccaccggggtgaaatccatggttttgggacgtttcctgagtcagattcgcgaaaaactgattcagagaatttaccgcgggatcgagccgactttgccaaactggttcgcggtcacaaagaccagaaatggcgccggaggcgggaacaaggtggtggatgagtgctacatccccaattacttgctccccaaaacccagcctgagctccagtgggcgtggactaatatggaacagtatttaagcgcctgtttgaatctcacggagcgtaaacggttggtggcgcagcatctgacgcacgtgtcgcagacgcaggagcagaacaaagagaatcagaatcccaattctgatgcgccggtgatcagatcaaaaacttcagccaggtacatggagctggtcgggtggctcgtggacaaggggattacctcggagaagcagtggatccaggaggaccaggcctcatacatctccttcaatgcggcctccaactcgcggtcccaaatcaaggctgccttggacaatgcgggaaagattatgagcctgactaaaaccgcccccgactacctggtgggccagcagcccgtggaggacatttccagcaatcggatttataaaattttggaactaaacgggtacgatccccaatatgcggcttccgtctttctgggatgggccacgaaaaagttcggcaagaggaacaccatctggctgtttgggcctgcaactaccgggaagaccaacatcgcggaggccatagcccacactgtgcccttctacgggtgcgtaaactggaccaatgagaactttcccttcaacgactgtgtcgacaagatggtgatctggtgggaggaggggaagatgaccgccaaggtcgtggagtcggccaaagccattctcggaggaagcaaggtgcgcgtggaccagaaatgcaagtcctcggcccagatagacccgactcccgtgatcgtcacctccaacaccaacatgtgcgccgtgattgacgggaactcaacgaccttcgaacaccagcagccgttgcaagaccggatgttcaaatttgaactcacccgccgtctggatcatgactttgggaaggtcaccaagcaggaagtcaaagactttttccggtgggcaaaggatcacgtggttgaggtggagcatgaattctacgtcaaaaagggtggagccaagaaaagacccgcccccagtgacgcagatataagtgagcccaaacgggtgcgcgagtcagttgcgcagccatcgacgtcagacgcggaagcttcgatcaactacgcagacaggtaccaaaacaaatgttctcgtcacgtgggcatgaatctgatgctgtttccctgcagacaatgcgagagaatgaatcagaattcaaatatctgcttcactcacggacagaaagactgtttagagtgctttcccgtgtcagaatctcaacccgtttctgtcgtcaaaaaggcgtatcagaaactgtgctacattcatcatatcatgggaaaggtgccagacgcttgcactgcctgcgatctggtcaatgtggatttggatgactgcatctttgaacaataaatgatttaaatcaggtatggctgccgatggttatcttccagattggctcgaggacaacctctctgagggcattcgcgagtggtgggcgctgaaacctggagccccgaagcccaaagccaaccagcaaaagcaggacgacggccggggtctggtgcttcctggctacaagtacctcggacccttcaacggactcgacaagggggagcccgtgaacgcggcggacgcagcggccctcgagcacgacaaggcctacgaccagcagctgcaggcgggtgacaatccgtacctgcggtataaccacgccgacgccgagtttcaggagcgtctgcaagaagatacgtcttttgggggcaacctcgggcgagcagtcttccaggccaagaagcgggttctcgaacctctcggtctggttgaggaaggcgctaagacggctcctggaaagaagagaccggtagagccatcaccccagcgttctccagactcctctacgggcatcggcaagaaaggccaacagcccgccagaaaaagactcaattttggtcagactggcgactcagagtcagttccagaccctcaacctctcggagaacctccagcagcgccctctggtgtgggacctaatacaatggctgcaggcggtggcgcaccaatggcagacaataacgaaggcgccgacggagtgggtagttcctcgggaaattggcattgcgattccacatggctgggcgacagagtcatcaccaccagcacccgaacctgggccctgcccacctacaacaaccacctctacaagcaaatctccaacgggacatcgggaggagccaccaacgacaacacctacttcggctacagcaccccctgggggtattttgactttaacagattccactgccacttttcaccacgtgactggcagcgactcatcaacaacaactggggattccggcccaagagactcagcttcaagctcttcaacatccaggtcaaggaggtcacgcagaatgaaggcaccaagaccatcgccaataacctcaccagcaccatccaggtgtttacggactcggagtaccagctgccgtacgttctcggctctgcccaccagggctgcctgcctccgttcccggcggacgtgttcatgattccccagtacggctacctaacactcaacaacggtagtcaggccgtgggacgctcctccttctactgcctggaatactttccttcgcagatgctgagaaccggcaacaacttccagtttacttacaccttcgaggacgtgcctttccacagcagctacgcccacagccagagcttggaccggctgatgaatcctctgattgaccagtacctgtactacttgtctcggactcaaacaacaggaggcacggcaaatacgcagactctgggcttcagccaaggtgggcctaatacaatggccaatcaggcaaagaactggctgccaggaccctgttaccgccaacaacgcgtctcaacgacaaccgggcaaaacaacaatagcaactttgcctggactgctgggaccaaataccatctgaatggaagaaattcattggctaatcctggcatcgctatggcaacacacaaagacgacgaggagcgtttttttcccagtaacgggatcctgatttttggcaaacaaaatgctgccagagacaatgcggattacagcgatgtcatgctcaccagcgaggaagaaatcaaaaccactaaccctgtggctacagaggaatacggtatcgtggcagataacttgcagcagcaaaacacggctcctcaaattggaactgtcaacagccagggggccttacccggtatggtctggcagaaccgggacgtgtacctgcagggtcccatctgggccaagattcctcacacggacggcaacttccacccgtctccgctgatgggcggctttggcctgaaacatcctccgcctcagatcctgatcaagaacacgcctgtacctgcggatcctccgaccaccttcaaccagtcaaagctgaactctttcatcacgcaatacagcaccggacaggtcagcgtggaaattgaatgggagctgcagaaggaaaacagcaagcgctggaaccccgagatccagtacacctccaactactacaaatctacaagtgtggactttgctgttaatacagaaggcgtgtactctgaaccccgccccattggcacccgttacctcacccgtaatctgtaattgcctgttaatcaataaaccggttgattcgtttcagttgaactttggtctctgcgaagggcgaattcgtttaaacctgcaggactagagccgaattctgcatcgcgatagggataacagggtaataaataatgtactagagacactttcaataaaggcaaatgcttttatttgtacactctcgggtgattatttacccccacccttgccgtctgcgccgttcagaagtcgaaggggttctgtctggcatcggaatgggccacgggcagagacacgttccggtactggtgcttggtggaccacttgaactcaggcacgaccattctaggcagctctgtgaagttctcgctccacaggctccgcaccatcaccagggcgttcagcaggtcaggggcgctgattttgaagtcgcagttaggtccgccgccctgggctctgctgtttctgtacacagggttgcagcactggaacacaataagagcagggtggtgcacgctggccagcacagacttgtcgctgatcaggtcggcgtcgagatcctcggcgttagacaaggcaaaaggggtcagcttgggcagctggcggcccaggaaaggggcgtggccgggcttgctattgcactcgcatctcagaggcatcagcaggtggccgtggccggtctgggcgttggggtacagggcctgcataaaggccttgatctgtttgaaggccacttgggccttggcgccttcggagaagaacatgccgcagcttttgccgctgaactggttggcggggcaggcggcgtcgtgcacacaacaccgggcgtcggtattgctgatctgcaccacgtttctgccccatctgttcttcacgatcttggccttgctgctctgctctttcagggccctctggccgttctcagaggtgacgtccatctcgatcacatgttccttgttgatcatgatgctgccgtgcagacacttcagctcgccctcgatttccgcgcatctgtgcagccacagggcacaaccggtaggctcgtggtgcttgtatgtcacctcagcaaaagattgcaggtaggcttgcaggaatctgcccatcatggtcacgaaggtcttgttggaggtaaaagtcagctgcagtcctctgtgttcctcgttcagccatgtcttgcacacggcggccagagcctcgacctgatctggcagcagcttgaaattagccttcaggtcgttgtccacgtgatacttatccatcagtgctctggcggcttccatgcccttctcccaggcggaaacgatgggcacgctcagggggttcatcacggtgatctcgctttcagcttctgaaggttcctcctcttcctcctgtgttctcatgccccgagccacggggtcgtcctcattcagtctccgcacggttctttttcctccctttccgtgcttaatcagtacaggaggattagagaagcccaccatctggagggcgacgtcctccctttcttcttcgctatccacgatcacttctgggctggggggccgttcaggctttgggctaggccgtttttttttcttcttaggggcgatagccagatcagcggcgcttgtagagggccgaggactaggggttctaggcacgagggcgtcctggctgctgtcctcctcatcctcgctctcgatccgtctccgcattctcttcttagggggggcccgcggagggggagggctagggctaggggacgacacatcttccatggttggaggtctgcgagcagcgcctctgcctctctctggtgttgtctcgcgctgttcttcctctctagaggccatttccttctcctataggcagaaaaagatcgttgaaactcactccggggctgtggacgtcggcttaccttcgcaaatttgtacctgaggactaccacgcccacgagattaggttctacgaagaccaatcccgcccgcctaatgcggagcttaccgcctgcgtcattacccagggccacattcttggccaattgcaagccatcaacaaagcccgccaagagtttctgctacgaaagggacggggggtttacttggacccccagtccggcgaggagctcaacccaatccccccgccgccgcagccctatcagcagcagccgcgggcccttgcttcccaggatggcacccaaaaagaagctgcagctgccgccgccacccacggacgaggaggaatactgggacagtcaggcagaggaggttttggacgaggaggaggaggacatgatggaagactgggagagcctagacgaggaagcttccgaggtcgaagaggtgtcagacgaaacaccgtcaccctcggtcgcattcccctcgccggcgccccagaaatcggcaaccggttccagcatggctacaacctccgctcctcaggcgccgccggcactgcccgttcgccgacccaaccgtagatgggacaccactggaaccagggccggtaagtccaagcagccgccgccgttagcccaagagcaacaacagcgccaaggctaccgctcatggcgcgggcacaagaacgccatagttgcttgcttgcaagactgtgggggcaacatctccttcgcccgccgctttcttctctaccatcacggcgtggccttcccccgtaacatcctgcattactaccgtcatctctacagcccatactgcaccggcggcagcggcagcaacagcagcggccacacagaagcaaaggcgaccggatagcaagactctgacaaagcccaagaaatccacagcggcggcagcagcaggaggaggagcgctgcgtctggcgcccaacgaacccgtatcgacccgcgagcttagaaacaggatttttcccactctgtatgctatatttcaacagagcaggggccaagaacaagagctgaaaataaaaaacaggtctctgcgatccctcacccgcagctgcctgtatcacaaaagcgaagatcagcttcggcgcacgctggaagacgcggaggctctcttcagtaaatactgcgcgctgactcttaaggactagtttcgcgccctttctcaaatttaagcgcgaaaactacgtcatctccagcggccacacccggcgccagcacctgttgtcagcgccattttttagggcggagtaacttgtatgtgttgggaattgtagttttcttaaaatgggaagtgacgtaacgtgggaaaacggaagtgacgatttgaggaagttgtgggttttttggctttcgtttctgggcgtaggttcgcgtgcggttttctgggtgttttttgtggactttaaccgttacgtcattttttagtcctatatatactcgctctgcacttggcccttttttacactgtgactgattgagctggtgccgtgtcgagtggtgtttttttaataggttttcttttttactggtaaggctgactgttatgactacgtccggcgttccatttggcatgacactacgaccaacacgatctcggttgtctcggcgcactccgtacagtagggatcgtctacctccttttgagacagaaacccgcgctaccatactggaggatcatccgctgctgcccgaatgtaacactttgacaatgcacaacgtgagttacgtgcgaggtcttccctgcagtgtgggatttacgctgattcaggaatgggttgttccctgggatatggttctaacgcgggaggagcttgtaatcctgaggaagtgtatgcacgtgtgcctgtgttgtgccaacattgatatcatgacgagcatgatgatccatggttacgagtcctgggctctccactgtcattgttccagtcccggttccctgcagtgtatagccggcgggcaggttttggccagctggtttaggatggtggtggatggcgccatgtttaatcagaggtttatatggtaccgggaggtggtgaattacaacatgccaaaagaggtaatgtttatgtccagcgtgtttatgaggggtcgccacttaatctacctgcgcttgtggtatgatggccacgtgggttctgtggtccccgccatgagctttggatacagcgccttgcactgtgggattttgaacaatattgtggtgctgtgctgcagttactgtgctgatttaagtgagatcagggtgcgctgctgtgcccggaggacaaggcgccttatgctgcgggcggtgcgaatcatcgctgaggagaccactgccatgttgtattcctgcaggacggagcggcggcggcagcagtttattcgcgcgctgctgcagcaccaccgccctatcctgatgcacgattatgactctacccccatgtaggcgtggacttctccttcgccgcccgttaagcaaccgcaagttggacagcagcctgtggctcagcagctggacagcgacatgaacttaagtgagctgcccggggagtttattaatatcactgatgagcgtttggctcgacaggaaaccgtgtggaatataacacctaagaatatgtctgttacccatgatatgatgctttttaaggccagccggggagaaaggactgtgtactctgtgtgttgggagggaggtggcaggttgaatactagggttctgtgagtttgattaaggtacggtgatctgtataagctatgtggtggtggggctatactactgaatgaaaaatgacttgaaattttctgcaattgaaaaataaacacgttgaaacataacacaaacgattctttattcttgggcaatgtatgaaaaagtgtaagaggatgtggcaaatatttcattaatgtagttgtggccagaccagtcccatgaaaatgacatagagtatgcacttggagttgtgtctcctgtttcctgtgtaccgtttagtgtaatggttagtgttacaggtttagttttgtctccgtttaagtaaacttgactgacaatgttacttttggcagttttaccgtgagattttggataagctgataggttaggcataaatccaacagcgtttgtataggctgtcgcccctcctgacgcggtaggaggaggggagggtgccctgcatgtctgccgctgctcttgctcttgccgctgctgaggaggggggcgcatctgccgcagcaccggatgcatctgggaaaagcaaaaaaggggctcgtccctgtttccggaggaatttgcaagcggggtcttgcatgacggggaggcaaacccccgttcgccgcagtccggccggtccgagactcgaaccgggggtcccgcgactcaacccttggaaaataaccctccggctacagggagcgagccacttaatgctttcgctttccagcctaaccgcttacgctgcgcgcggccagtggccaaaaaagctagcgcagcagccgccgcgcctggaaggaagccaaaaggagcactcccccgttgtctgacgtcgcacacctgggttcgacacgcgggcggtaaccgcatggatcacggcggacggccggatacggggctcgaaccccggtcgtccgccatgatacccttgcgaatttatccaccagaccacggaagagtgcccgcttacaggctctccttttgcacggtctagagcgtcaacgattgcgcgcgcctgaccggccagagcgtcccgaccatggagcactttttgccgctgcgcaacatctggaaccgcgtccgcgactttccgcgcgcctccaccaccgccgccggcatcacctggatgtccaggtacatctacggatatggcaaacagctattatgggtattatgggtgcggccgcggatcccgggcccgtcgactgcagaggcctgcatgcaagcttggtgtaatcatggtcatagctgtttcctgtgtgaaattgttatccgctcacaattccacacaacatacgagccggaagcataaagtgtaaagcctggggtgcctaatgagtgagctaactcacattaattgcgttgcgctcactgcccgctttccagtcgggaaacctgtcgtgccagctgcattaatgaatcggccaacgcgcggggagaggcggtttgcgtattgggcgctcttccgcttcctcgctcactgactcgctgcgctcggtcgttcggctgcggcgagcggtatcagctcactcaaaggcggtaatacggttatccacagaatcaggggataacgcaggaaagaacatgtgagcaaaaggccagcaaaaggccaggaaccgtaaaaaggccgcgttgctggcgtttttccataggctccgcccccctgacgagcatcacaaaaatcgacgctcaagtcagaggtggcgaaacccgacaggactataaagataccaggcgtttccccctggaagctccctcgtgcgctctcctgttccgaccctgccgcttaccggatacctgtccgcctttctcccttcgggaagcgtggcgctttctcatagctcacgctgtaggtatctcagttcggtgtaggtcgttcgctccaagctgggctgtgtgcacgaaccccccgttcagcccgaccgctgcgccttatccggtaactatcgtcttgagtccaacccggtaagacacgacttatcgccactggcagcagccactggtaacaggattagcagagcgaggtatgtaggcggtgctacagagttcttgaagtggtggcctaactacggctacactagaagaacagtatttggtatctgcgctctgctgaagccagttaccttcggaaaaagagttggtagctcttgatccggcaaacaaaccaccgctggtagcggtggtttttttgtttgcaagcagcagattacgcgcagaaaaaaaggatctcaagaagatcctttgatcttttctacggggtctgacgctcagtggaacgaaaactcacgttaagggattttggtcatgagattatcaaaaaggatcttcacctagaaggtcctgtattagaggtcacgtgagtgttttgcgacattttgcgacaccatgtggtcacgctgggtatttaagcccgagtgagcacgcagggtctccattttgaagcgggaggtttgaacgcgcagccgccatccttttaaattaaaaatgaagttttaaatcaagcccaatctgaataatgttacaaccaattaaccaattctgattagaaaaactcatcgagcatcaaatgaaactgcaatttattcatatcaggattatcaataccatatttttgaaaaagccgtttctgtaatgaaggagaaaactcaccgaggcagttccataggatggcaagatcctggtatcggtctgcgattccgactcgtccaacatcaatacaacctattaatttcccctcgtcaaaaataaggttatcaagtgagaaatcaccatgagtgacgactgaatccggtgagaatggcaaaagtttatgcatttctttccagacttgttcaacaggccagccattacgctcgtcatcaaaatcactcgcatcaaccaaaccgttattcattcgtgattgcgcctgagcgagacgaaatacgcgatcgctgttaaaaggacaattacaaacaggaatcgaatgcaaccggcgcaggaacactgccagcgcatcaacaatattttcacctgaatcaggatattcttctaatacctggaatgctgtttttccggggatcgcagtggtgagtaaccatgcatcatcaggagtacggataaaatgcttgatggtcggaagaggcataaattccgtcagccagtttagtctgaccatctcatctgtaacatcattggcaacgctacctttgccatgtttcagaaacaactctggcgcatcgggcttcccatacaagcgatagattgtcgcacctgattgcccgacattatcgcgagcccatttatacccatataaatcagcatccatgttggaatttaatcgcggcctcgacgtttcccgttgaatatggctcataacaccccttgtattactgtttatgtaagcagacagttttattgttcatgatgatatatttttatcttgtgcaatgtaacatcagagattttgagacacgggccagagctgca

SEQ ID NO: 200 - DNA, 5505 bp, synthetic construct; identical to SEQ ID NO: 106
  source 1..5505: mol_type = other DNA

SEQ ID NO: 201 - DNA, 2217 bp, synthetic construct
  source 1..2217: mol_type = other DNA
atggctgccgatggttatcttccagattggctcgaggacaacctctctgagggcattcgcgagtggtgggcgctgaaacctggagccccgaagcccaaagccaaccagcaaaagcaggacgacggccggggtctggtgcttcctggctacaagtacctcggacccttcaacggactcgacaagggggagcccgtcaacgcggcggacgcagcggccctcgagcacgacaaggcctacgaccagcagctgcaggcgggtgacaatccgtacctgcggtataaccacgccgacgccgagtttcaggagcgtctgaaagaagatacgtcttttgggggcaacctcgggcgagcagtcttccaggccaagaagcgggttctcgaacctctcggtctggttgaggaaggcgctaagacggctcctggaaagaagagaccggtagagccatcaccccagcgttctccagactcctctacgggcatcggcaagaaaggccaacagcccgccagaaaaagactcaattttggtcagactggcgactcagagtcagttccagaccctcaacctctcggagaacctccagcagcgccctctggtgtgggacctaatacaatggctgcaggcggtggcgcaccaatggcagacaataacgaaggcgccgacggagtgggtagttcctcgggaaattggcattgcgattccacatggctgggcgacagagtcatcaccaccagcacccgaacctgggccctgcccacctacaacaaccacctctacaagcaaatctccaacgggacatcgggaggagccaccaacgacaacacctacttcggctacagcaccccctgggggtattttgactttaacagattccactgccacttttcaccacgtgactggcagcgactcatcaacaacaactggggattccggcccaagagactcagcttcaagctcttcaacatccaggtcaaggaggtcacgcagaatgaaggcaccaagaccatcgccaataacctcaccagcaccatccaggtgtttacggactcggagtaccagctgccgtacgttctcggctctgcccaccagggctgcctgcctccgttcccggcggacgtgttcatgattccccagtacggctacctaacactcaacaacggtagtcaggccgtgggacgctcctccttctactgcctggaatactttccttcgcagatgctgagaaccggcaacaacttccagtttacttacaccttcgaggacgtgcctttccacagcagctacgcccacagccagagcttggaccggctgatgaatcctctgattgaccagtacctgtactacttgtctcggactcaaacaacaggaggcacggcaaatacgcagactctgggcttcagccaaggtgggcctaatacaatggccaatcaggcaaagaactggctgccaggaccctgttaccgccaacaacgcgtctcaacgacaaccgggcaaaacaacaatagcaactttgcctggactgctgggaccaaataccatctgaatggaagaaattcattggctaatcctggcatcgctatggcaacacacaaagacgacgaggagcgtttttttcccagtaacgggatcctgatttttggcaaacaaaatgctgccagagacaatgcggattacagcgatgtcatgctcaccagcgaggaagaaatcaaaaccactaaccctgtggctacagaggaatacggtatcgtggcagataacttgcagcagcaaaacacggctcctcaaattggaactgtcaacagccagggggccttacccggtatggtctggcagaaccgggacgtgtacctgcagggtcccatctgggccaagattcctcacacggacggcaacttccacccgtctccgctgatgggcggctttggcctgaaacatcctccgcctcagatcctgatcaagaacacgcctgtacctgcggatcctccgaccaccttcaaccagtcaaagctgaactctttcatcacgcaatacagcaccggacaggtcagcgtggaaattgaatgggagctgcagaaggaaaacagcaagcgctggaaccccgagatccagtacacctccaactactacaaatctacaagtgtggactttgctgttaatacagaaggcgtgtactctgaaccccgccccattggcacccgttacctcacccgtaatctgtaa

SEQ ID NO: 202 - DNA, 4099 bp, synthetic construct
  source 1..4099: mol_type = other DNA
atgccggggttttacgagattgtgattaaggtccccagcgaccttgacgagcatctgcccggcatttctgacagctttgtgaactgggtggccgagaaggaatgggagttgccgccagattctgacatggatctgaatctgattgagcaggcacccctgaccgtggccgagaagctgcagcgcgactttctgacggaatggcgccgtgtgagtaaggccccggaggctcttttctttgtgcaatttgagaagggagagagctacttccacatgcacgtgctcgtggaaaccaccggggtgaaatccatggttttgggacgtttcctgagtcagattcgcgaaaaactgattcagagaatttaccgcgggatcgagccgactttgccaaactggttcgcggtcacaaagaccagaaatggcgccggaggcgggaacaaggtggtggatgagtgctacatccccaattacttgctccccaaaacccagcctgagctccagtgggcgtggactaatatggaacagtatttaagcgcctgtttgaatctcacggagcgtaaacggttggtggcgcagcatctgacgcacgtgtcgcagacgcaggagcagaacaaagagaatcagaatcccaattctgatgcgccggtgatcagatcaaaaacttcagccaggtacatggagctggtcgggtggctcgtggacaaggggattacctcggagaagcagtggatccaggaggaccaggcctcatacatctccttcaatgcggcctccaactcgcggtcccaaatcaaggctgccttggacaatgcgggaaagattatgagcctgactaaaaccgcccccgactacctggtgggccagcagcccgtggaggacatttccagcaatcggatttataaaattttggaactaaacgggtacgatccccaatatgcggcttccgtctttctgggatgggccacgaaaaagttcggcaagaggaacaccatctggctgtttgggcctgcaactaccgggaagaccaacatcgcggaggccatagcccacactgtgcccttctacgggtgcgtaaactggaccaatgagaactttcccttcaacgactgtgtcgacaagatggtgatctggtgggaggaggggaagatgaccgccaaggtcgtggagtcggccaaagccattctcggaggaagcaaggtgcgcgtggaccagaaatgcaagtcctcggcccagatagacccgactcccgtgatcgtcacctccaacaccaacatgtgcgccgtgattgacgggaactcaacgaccttcgaacaccagcagccgttgcaagaccggatgttcaaatttgaactcacccgccgtctggatcatgactttgggaaggtcaccaagcaggaagtcaaagactttttccggtgggcaaaggatcacgtggttgaggtggagcatgaattctacgtcaaaaagggtggagccaagaaaagacccgcccccagtgacgcagatataagtgagcccaaacgggtgcgcgagtcagttgcgcagccatcgacgtcagacgcggaagcttcgatcaactacgcagacaggtaccaaaacaaatgttctcgtcacgtgggcatgaatctgatgctgtttccctgcagacaatgcgagagaatgaatcagaattcaaatatctgcttcactcacggacagaaagactgtttagagtgctttcccgtgtcagaatctcaacccgtttctgtcgtcaaaaaggcgtatcagaaactgtgctacattcatcatatcatgggaaaggtgccagacgcttgcactgcctgcgatctggtcaatgtggatttggatgactgcatctttgaacaataaatgatttaaatcaggtatggctgccgatggttatcttccagattggctcgaggacaacctctctgagggcattcgcgagtggtgggcgctgaaacctggagccccgaagcccaaagccaaccagcaaaagcaggacgacggccggggtctggtgcttcctggctacaagtacctcggacccttcaacggactcgacaagggggagcccgtcaacgcggcggacgcagcggccctcgagcacgacaaggcctacgaccagcagctgcaggcgggtgacaatccgtacctgcggtataaccacgccgacgccgagtttcaggagcgtctgaaagaagatacgtcttttgggggcaacctcgggcgagcagtcttccaggccaagaagcgggttctcgaacctctcggtctggttgaggaaggcgctaagacggctcctggaaagaagagaccggtagagccatcaccccagcgttctccagactcctctacgggcatcggcaagaaaggccaacagcccgccagaaaaagactcaattttggtcagactggcgactcagagtcagttccagaccctcaacctctcggagaacctccagcagcgccctctggtgtgggacctaatacaatggctgcaggcggtggcgcaccaatggcagacaataacgaaggcgccgacggagtgggtagttcctcgggaaattggcattgcgattccacatggctgggcgacagagtcatcaccaccagcacccgaacctgggccctgcccacctacaacaaccacctctacaagcaaatctccaacgggacatcgggaggagccaccaacgacaacacctacttcggctacagcaccccctgggggtattttgactttaacagattccactgccacttttcaccacgtgactggcagcgactcatcaacaacaactggggattccggcccaagagactcagcttcaagctcttcaacatccaggtcaaggaggtcacgcagaatgaaggcaccaagaccatcgccaataacctcaccagcaccatccaggtgtttacggactcggagtaccagctgccgtacgttctcggctctgcccaccagggctgcctgcctccgttcccggcggacgtgttcatgattccccagtacggctacctaacactcaacaacggtagtcaggccgtgggacgctcctccttctactgcctggaatactttccttcgcagatgctgagaaccggcaacaacttccagtttacttacaccttcgaggacgtgcctttccacagcagctacgcccacagccagagcttggaccggctgatgaatcctctgattgaccagtacctgtactacttgtctcggactcaaacaacaggaggcacggcaaatacgcagactctgggcttcagccaaggtgggcctaatacaatggccaatcaggcaaagaactggctgccaggaccctgttaccgccaacaacgcgtctcaacgacaaccgggcaaaacaacaatagcaactttgcctggactgctgggaccaaataccatctgaatggaagaaattcattggctaatcctggcatcgctatggcaacacacaaagacgacgaggagcgtttttttcccagtaacgggatcctgatttttggcaaacaaaatgctgccagagacaatgcggattacagcgatgtcatgctcaccagcgaggaagaaatcaaaaccactaaccctgtggctacagaggaatacggtatcgtggcagataacttgcagcagcaaaacacggctcctcaaattggaactgtcaacagccagggggccttacccggtatggtctggcagaaccgggacgtgtacctgcagggtcccatctgggccaagattcctcacacggacggcaacttccacccgtctccgctgatgggcggctttggcctgaaacatcctccgcctcagatcctgatcaagaacacgcctgtacctgcggatcctccgaccaccttcaaccagtcaaagctgaactctttcatcacgcaatacagcaccggacaggtcagcgtggaaattgaatgggagctgcagaaggaaaacagcaagcgctggaaccccgagatccagtacacctccaactactacaaatctacaagtgtggactttgctgttaatacagaaggcgtgtactctgaaccccgccccattggcacccgttacctcacccgtaatctgtaa

SEQ ID NO: 203 - DNA, 9825 bp, synthetic construct
  source 1..9825: mol_type = other DNA
atgccggggttttacgagattgtgattaaggtccccagcgaccttgacgagcatctgcccggcatttctgacagctttgtgaactgggtggccgagaaggaatgggagttgccgccagattctgacatggatctgaatctgattgagcaggcacccctgaccgtggccgagaagctgcagcgcgactttctgacggaatggcgccgtgtgagtaaggccccggaggctcttttctttgtgcaatttgagaagggagagagctacttccacatgcacgtgctcgtggaaaccaccggggtgaaatccatggttttgggacgtttcctgagtcagattcgcgaaaaactgattcagagaatttaccgcgggatcgagccgactttgccaaactggttcgcggtcacaaagaccagaaatggcgccggaggcgggaacaaggtggtggatgagtgctacatccccaattacttgctccccaaaacccagcctgagctccagtgggcgtggactaatatggaacagtatttaagcgcctgtttgaatctcacggagcgtaaacggttggtggcgcagcatctgacgcacgtgtcgcagacgcaggagcagaacaaagagaatcagaatcccaattctgatgcgccggtgatcagatcaaaaacttcagccaggtacatggagctggtcgggtggctcgtggacaaggggattacctcggagaagcagtggatccaggaggaccaggcctcatacatctccttcaatgcggcctccaactcgcggtcccaaatcaaggctgccttggacaatgcgggaaagattatgagcctgactaaaaccgcccccgactacctggtgggccagcagcccgtggaggacatttccagcaatcggatttataaaattttggaactaaacgggtacgatccccaatatgcggcttccgtctttctgggatgggccacgaaaaagttcggcaagaggaacaccatctggctgtttgggcctgcaactaccgggaagaccaacatcgcggaggccatagcccacactgtgcccttctacgggtgcgtaaactggaccaatgagaactttcccttcaacgactgtgtcgacaagatggtgatctggtgggaggaggggaagatgaccgccaaggtcgtggagtcggccaaagccattctcggaggaagcaaggtgcgcgtggaccagaaatgcaagtcctcggcccagatagacccgactcccgtgatcgtcacctccaacaccaacatgtgcgccgtgattgacgggaactcaacgaccttcgaacaccagcagccgttgcaagaccggatgttcaaatttgaactcacccgccgtctggatcatgactttgggaaggtcaccaagcaggaagtcaaagactttttccggtgggcaaaggatcacgtggttgaggtggagcatgaattctacgtcaaaaagggtggagccaagaaaagacccgcccccagtgacgcagatataagtgagcccaaacgggtgcgcgagtcagttgcgcagccatcgacgtcagacgcggaagcttcgatcaactacgcagacaggtaccaaaacaaatgttctcgtcacgtgggcatgaatctgatgctgtttccctgcagacaatgcgagagaatgaatcagaattcaaatatctgcttcactcacggacagaaagactgtttagagtgctttcccgtgtcagaatctcaacccgtttctgtcgtcaaaaaggcgtatcagaaactgtgctacattcatcatatcatgggaaaggtgccagacgcttgcactgcctgcgatctggtcaatgtggatttggatgactgcatctttgaacaataaatgatttaaatcaggtatggctgccgatggttatcttccagattggctcgaggacaacctctctgagggcattcgcgagtggtgggcgctgaaacctggagccccgaagcccaaagccaaccagcaaaagcaggacgacggccggggtctggtgcttcctggctacaagtacctcggacccttcaacggactcgacaagggggagcccgtcaacgcggcggacgcagcggccctcgagcacgacaaggcctacgaccagcagctgcaggcgggtgacaatccgtacctgcggtataaccacgccgacgccgagtttcaggagcgtctgaaagaagatacgtcttttgggggcaacctcgggcgagcagtcttccaggccaagaagcgggttctcgaacctctcggtctggttgaggaaggcgctaagacggctcctggaaagaagagaccggtagagccatcaccccagcgttctccagactcctctacgggcatcggcaagaaaggccaacagcccgccagaaaaagactcaattttggtcagactggcgactcagagtcagttccagaccctcaacctctcggagaacctccagcagcgccctctggtgtgggacctaatacaatggctgcaggcggtggcgcaccaatggcagacaataacgaaggcgccgacggagtgggtagttcctcgggaaattggcattgcgattccacatggctgggcgacagagtcatcaccaccagcacccgaacctgggccctgcccacctacaacaaccacctctacaagcaaatctccaacgggacatcgggaggagccaccaacgacaacacctacttcggctacagcaccccctgggggtattttgactttaacagattccactgccacttttcaccacgtgactggcagcgactcatcaacaacaactggggattccggcccaagagactcagcttcaagctcttcaacatccaggtcaaggaggtcacgcagaatgaaggcaccaagaccatcgccaataacctcaccagcaccatccaggtgtttacggactcggagtaccagctgccgtacgttctcggctctgcccaccagggctgcctgcctccgttcccggcggacgtgttcatgattccccagtacggctacctaacactcaacaacggtagtcaggccgtgggacgctcctccttctactgcctggaatactttccttcgcagatgctgagaaccggcaacaacttccagtttacttacaccttcgaggacgtgcctttccacagcagctacgcccacagccagagcttggaccggctgatgaatcctctgattgaccagtacctgtactacttgtctcggactcaaacaacaggaggcacggcaaatacgcagactctgggcttcagccaaggtgggcctaatacaatggccaatcaggcaaagaactggctgccaggaccctgttaccgccaacaacgcgtctcaacgacaaccgggcaaaacaacaatagcaactttgcctggactgctgggaccaaataccatctgaatggaagaaattcattggctaatcctggcatcgctatggcaacacacaaagacgacgaggagcgtttttttcccagtaacgggatcctgatttttggcaaacaaaatgctgccagagacaatgcggattacagcgatgtcatgctcaccagcgaggaagaaatcaaaaccactaaccctgtggctacagaggaatacggtatcgtggcagataacttgcagcagcaaaacacggctcctcaaattggaactgtcaacagccagggggccttacccggtatggtctggcagaaccgggacgtgtacctgcagggtcccatctgggccaagattcctcacacggacggcaacttccacccgtctccgctgatgggcggctttggcctgaaacatcctccgcctcagatcctgatcaagaacacgcctgtacctgcggatcctccgaccaccttcaaccagtcaaagctgaactctttcatcacgcaatacagcaccggacaggtcagcgtggaaattgaatgggagctgcagaaggaaaacagcaagcgctggaaccccgagatccagtacacctccaactactacaaatctacaagtgtggactttgctgttaatacagaaggcgtgtactctgaaccccgccccattggcacccgttacctcacccgtaatctgtaattgcctgttaatcaataaaccggttgattcgtttcagttgaactttggtctctgcgaagggcgaattcgtttaaacctgcaggactagagccgaattctgcatcgcgatagggataacagggtaataaataatgtactagagacactttcaataaaggcaaatgcttttatttgtacactctcgggtgattatttacccccacccttgccgtctgcgccgttcagaagtcgaaggggttctgtctggcatcggaatgggccacgggcagagacacgttccggtactggtgcttggtggaccacttgaactcaggcacgaccattctaggcagctctgtgaagttctcgctccacaggctccgcaccatcaccagggcgttcagcaggtcaggggcgctgattttgaagtcgcagttaggtccgccgccctgggctctgctgtttctgtacacagggttgcagcactggaacacaataagagcagggtggtgcacgctggccagcacagacttgtcgctgatcaggtcggcgtcgagatcctcggcgttagacaaggcaaaaggggtcagcttgggcagctggcggcccaggaaaggggcgtggccgggcttgctattgcactcgcatctcagaggcatcagcaggtggccgtggccggtctgggcgttggggtacagggcctgcataaaggccttgatctgtttgaaggccacttgggccttggcgccttcggagaagaacatgccgcagcttttgccgctgaactggttggcggggcaggcggcgtcgtgcacacaacaccgggcgtcggtattgctgatctgcaccacgtttctgccccatctgttcttcacgatcttggccttgctgctctgctctttcagggccctctggccgttctcagaggtgacgtccatctcgatcacatgttccttgttgatcatgatgctgccgtgcagacacttcagctcgccctcgatttccgcgcatctgtgcagccacagggcacaaccggtaggctcgtggtgcttgtatgtcacctcagcaaaagattgcaggtaggcttgcaggaatctgcccatcatggtcacgaaggtcttgttggaggtaaaagtcagctgcagtcctctgtgttcctcgttcagccatgtcttgcacacggcggccagagcctcgacctgatctggcagcagcttgaaattagccttcaggtcgttgtccacgtgatacttatccatcagtgctctggcggcttccatgcccttctcccaggcggaaacgatgggcacgctcagggggttcatcacggtgatctcgctttcagcttctgaaggttcctcctcttcctcctgtgttctcatgccccgagccacggggtcgtcctcattcagtctccgcacggttctttttcctccctttccgtgcttaatcagtacaggaggattagagaagcccaccatctggagggcgacgtcctccctttcttcttcgctatccacgatcacttctgggctggggggccgttcaggctttgggctaggccgtttttttttcttcttaggggcgatagccagatcagcggcgcttgtagagggccgaggactaggggttctaggcacgagggcgtcctggctgctgtcctcctcatcctcgctctcgatccgtctccgcattctcttcttagggggggcccgcggagggggagggctagggctaggggacgacacatcttccatggttggaggtctgcgagcagcgcctctgcctctctctggtgttgtctcgcgctgttcttcctctctagaggccatttccttctcctataggcagaaaaagatcgttgaaactcactccggggctgtggacgtcggcttaccttcgcaaatttgtacctgaggactaccacgcccacgagattaggttctacgaagaccaatcccgcccgcctaatgcggagcttaccgcctgcgtcattacccagggccacattcttggccaattgcaagccatcaacaaagcccgccaagagtttctgctacgaaagggacggggggtttacttggacccccagtccggcgaggagctcaacccaatccccccgccgccgcagccctatcagcagcagccgcgggcccttgcttcccaggatggcacccaaaaagaagctgcagctgccgccgccacccacggacgaggaggaatactgggacagtcaggcagaggaggttttggacgaggaggaggaggacatgatggaagactgggagagcctagacgaggaagcttccgaggtcgaagaggtgtcagacgaaacaccgtcaccctcggtcgcattcccctcgccggcgccccagaaatcggcaaccggttccagcatggctacaacctccgctcctcaggcgccgccggcactgcccgttcgccgacccaaccgtagatgggacaccactggaaccagggccggtaagtccaagcagccgccgccgttagcccaagagcaacaacagcgccaaggctaccgctcatggcgcgggcacaagaacgccatagttgcttgcttgcaagactgtgggggcaacatctccttcgcccgccgctttcttctctaccatcacggcgtggccttcccccgtaacatcctgcattactaccgtcatctctacagcccatactgcaccggcggcagcggcagcaacagcagcggccacacagaagcaaaggcgaccggatagcaagactctgacaaagcccaagaaatccacagcggcggcagcagcaggaggaggagcgctgcgtctggcgcccaacgaacccgtatcgacccgcgagcttagaaacaggatttttcccactctgtatgctatatttcaacagagcaggggccaagaacaagagctgaaaataaaaaacaggtctctgcgatccctcacccgcagctgcctgtatcacaaaagcgaagatcagcttcggcgcacgctggaagacgcggaggctctcttcagtaaatactgcgcgctgactcttaaggactagtttcgcgccctttctcaaatttaagcgcgaaaactacgtcatctccagcggccacacccggcgccagcacctgttgtcagcgccattttttagggcggagtaacttgtatgtgttgggaattgtagttttcttaaaatgggaagtgacgtaacgtgggaaaacggaagtgacgatttgaggaagttgtgggttttttggctttcgtttctgggcgtaggttcgcgtgcggttttctgggtgttttttgtggactttaaccgttacgtcattttttagtcctatatatactcgctctgcacttggcccttttttacactgtgactgattgagctggtgccgtgtcgagtggtgtttttttaataggttttcttttttactggtaaggctgactgttatgactacgtccggcgttccatttggcatgacactacgaccaacacgatctcggttgtctcggcgcactccgtacagtagggatcgtctacctccttttgagacagaaacccgcgctaccatactggaggatcatccgctgctgcccgaatgtaacactttgacaatgcacaacgtgagttacgtgcgaggtcttccctgcagtgtgggatttacgctgattcaggaatgggttgttccctgggatatggttctaacgcgggaggagcttgtaatcctgaggaagtgtatgcacgtgtgcctgtgttgtgccaacattgatatcatgacgagcatgatgatccatggttacgagtcctgggctctccactgtcattgttccagtcccggttccctgcagtgtatagccggcgggcaggttttggccagctggtttaggatggtggtggatggcgccatgtttaatcagaggtttatatggtaccgggaggtggtgaattacaacatgccaaaagaggtaatgtttatgtccagcgtgtttatgaggggtcgccacttaatctacctgcgcttgtggtatgatggccacgtgggttctgtggtccccgccatgagctttggatacagcgccttgcactgtgggattttgaacaatattgtggtgctgtgctgcagttactgtgctgatttaagtgagatcagggtgcgctgctgtgcccggaggacaaggcgccttatgctgcgggcggtgcgaatcatcgctgaggagaccactgccatgttgtattcctgcaggacggagcggcggcggcagcagtttattcgcgcgctgctgcagcaccaccgccctatcctgatgcacgattatgactctacccccatgtaggcgtggacttctccttcgccgcccgttaagcaaccgcaagttggacagcagcctgtggctcagcagctggacagcgacatgaacttaagtgagctgcccggggagtttattaatatcactgatgagcgtttggctcgacaggaaaccgtgtggaatataacacctaagaatatgtctgttacccatgatatgatgctttttaaggccagccggggagaaaggactgtgtactctgtgtgttgggagggaggtggcaggttgaatactagggttctgtgagtttgattaaggtacggtgatctgtataagctatgtggtggtggggctatactactgaatgaaaaatgacttgaaattttctgcaattgaaaaataaacacgttgaaacataacacaaacgattctttattcttgggcaatgtatgaaaaagtgtaagaggatgtggcaaatatttcattaatgtagttgtggccagaccagtcccatgaaaatgacatagagtatgcacttggagttgtgtctcctgtttcctgtgtaccgtttagtgtaatggttagtgttacaggtttagttttgtctccgtttaagtaaacttgactgacaatgttacttttggcagttttaccgtgagattttggataagctgataggttaggcataaatccaacagcgtttgtataggctgtcgcccctcctgacgcggtaggaggaggggagggtgccctgcatgtctgccgctgctcttgctcttgccgctgctgaggaggggggcgcatctgccgcagcaccggatgcatctgggaaaagcaaaaaaggggctcgtccctgtttccggaggaatttgcaagcggggtcttgcatgacggggaggcaaacccccgttcgccgcagtccggccggtccgagactcgaaccgggggtcccgcgactcaacccttggaaaataaccctccggctacagggagcgagccacttaatgctttcgctttccagcctaaccgcttacgctgcgcgcggccagtggccaaaaaagctagcgcagcagccgccgcgcctggaaggaagccaaaaggagcactcccccgttgtctgacgtcgcacacctgggttcgacacgcgggcggtaaccgcatggatcacggcggacggccggatacggggctcgaaccccggtcgtccgccatgatacccttgcgaatttatccaccagaccacggaagagtgcccgcttacaggctctccttttgcacggtctagagcgtcaacgattgcgcgcgcctgaccggccagagcgtcccgaccatggagcactttttgccgctgcgcaacatctggaaccgcgtccgcgactttccgcgcgcctccaccaccgccgccggcatcacctggatgtccaggtacatctacggata

SEQ ID NO: 204 - DNA, 12588 bp, synthetic construct
  source 1..12588: mol_type = other DNA
tcgcgcgtttcggtgatgacggtgaaaacctctgacacatgcagctcccggagacggtcacagcttgtctgtaagcggatgccgggagcagacaagcccgtcagggcgcgtcagcgggtgttggcgggtgtcggggctggcttaactatgcggcatcagagcagattgtactgagagtgcaccatatgcggtgtgaaataccgcacagatgcgtaaggagaaaataccgcatcaggcgccattcgccattcaggctgcgcaactgttgggaagggcgatcggtgcgggcctcttcgctattacgccagctggcgaaagggggatgtgctgcaaggcgattaagttgggtaacgccagggttttcccagtcacgacgttgtaaaacgacggccagagaattccgcagggtctccattttgaagcgggaggtttgaacgcgcagccgccatgccggggttttacgagattgtgattaaggtccccagcgaccttgacgagcatctgcccggcatttctgacagctttgtgaactgggtggccgagaaggaatgggagttgccgccagattctgacatggatctgaatctgattgagcaggcacccctgaccgtggccgagaagctgcagcgcgactttctgacggaatggcgccgtgtgagtaaggccccggaggctcttttctttgtgcaatttgagaagggagagagctacttccacatgcacgtgctcgtggaaaccaccggggtgaaatccatggttttgggacgtttcctgagtcagattcgcgaaaaactgattcagagaatttaccgcgggatcgagccgactttgccaaactggttcgcggtcacaaagaccagaaatggcgccggaggcgggaacaaggtggtggatgagtgctacatccccaattacttgctccccaaaacccagcctgagctccagtgggcgtggactaatatggaacagtatttaagcgcctgtttgaatctcacggagcgtaaacggttggtggcgcagcatctgacgcacgtgtcgcagacgcaggagcagaacaaagagaatcagaatcccaattctgatgcgccggtgatcagatcaaaaacttcagccaggtacatggagctggtcgggtggctcgtggacaaggggattacctcggagaagcagtggatccaggaggaccaggcctcatacatctccttcaatgcggcctccaactcgcggtcccaaatcaaggctgccttggacaatgcgggaaagattatgagcctgactaaaaccgcccccgactacctggtgggccagcagcccgtggaggacatttccagcaatcggatttataaaattttggaactaaacgggtacgatccccaatatgcggcttccgtctttctgggatgggccacgaaaaagttcggcaagaggaacaccatctggctgtttgggcctgcaactaccgggaagaccaacatcgcggaggccatagcccacactgtgcccttctacgggtgcgtaaactggaccaatgagaactttcccttcaacgactgtgtcgacaagatggtgatctggtgggaggaggggaagatgaccgccaaggtcgtggagtcggccaaagccattctcggaggaagcaaggtgcgcgtggaccagaaatgcaagtcctcggcccagatagacccgactcccgtgatcgtcacctccaacaccaacatgtgcgccgtgattgacgggaactcaacgaccttcgaacaccagcagccgttgcaagaccggatgttcaaatttgaactcacccgccgtctggatcatgactttgggaaggtcaccaagcaggaagtcaaagactttttccggtgggcaaaggatcacgtggttgaggtggagcatgaattctacgtcaaaaagggtggagccaagaaaagacccgcccccagtgacgcagatataagtgagcccaaacgggtgcgcgagtcagttgcgcagccatcgacgtcagacgcggaagcttcgatcaactacgcagacaggtaccaaaacaaatgttctcgtcacgtgggcatgaatctgatgctgtttccctgcagacaatgcgagagaatgaatcagaattcaaatatctgcttcactcacggacagaaagactgtttagagtgctttcccgtgtcagaatctcaacccgtttctgtcgtcaaaaaggcgtatcagaaactgtgctacattcatcatatcatgggaaaggtgccagacgcttgcactgcctgcgatctggtcaatgtggatttggatgactgcatctttgaacaataaatgatttaaatcaggtatggctgccgatggttatcttccagattggctcgaggacaacctctctgagggcattcgcgagtggtgggcgctgaaacctggagccccgaagcccaaagccaaccagcaaaagcaggacgacggccggggtctggtgcttcctggctacaagtacctcggacccttcaacggactcgacaagggggagcccgtcaacgcggcggacgcagcggccctcgagcacgacaaggcctacgaccagcagctgcaggcgggtgacaatccgtacctgcggtataaccacgccgacgccgagtttcaggagcgtctgaaagaagatacgtcttttgggggcaacctcgggcgagcagtcttccaggccaagaagcgggttctcgaacctctcggtctggttgaggaaggcgctaagacggctcctggaaagaagagaccggtagagccatcaccccagcgttctccagactcctctacgggcatcggcaagaaaggccaacagcccgccagaaaaagactcaattttggtcagactggcgactcagagtcagttccagaccctcaacctctcggagaacctccagcagcgccctctggtgtgggacctaatacaatggctgcaggcggtggcgcaccaatggcagacaataacgaaggcgccgacggagtgggtagttcctcgggaaattggcattgcgattccacatggctgggcgacagagtcatcaccaccagcacccgaacctgggccctgcccacctacaacaaccacctctacaagcaaatctccaacgggacatcgggaggagccaccaacgacaacacctacttcggctacagcaccccctgggggtattttgactttaacagattccactgccacttttcaccacgtgactggcagcgactcatcaacaacaactggggattccggcccaagagactcagcttcaagctcttcaacatccaggtcaaggaggtcacgcagaatgaaggcaccaagaccatcgccaataacctcaccagcaccatccaggtgtttacggactcggagtaccagctgccgtacgttctcggctctgcccaccagggctgcctgcctccgttcccggcggacgtgttcatgattccccagtacggctacctaacactcaacaacggtagtcaggccgtgggacgctcctccttctactgcctggaatactttccttcgcagatgctgagaaccggcaacaacttccagtttacttacaccttcgaggacgtgcctttccacagcagctacgcccacagccagagcttggaccggctgatgaatcctctgattgaccagtacctgtactacttgtctcggactcaaacaacaggaggcacggcaaatacgcagactctgggcttcagccaaggtgggcctaatacaatggccaatcaggcaaagaactggctgccaggaccctgttaccgccaacaacgcgtctcaacgacaaccgggcaaaacaacaatagcaactttgcctggactgctgggaccaaataccatctgaatggaagaaattcattggctaatcctggcatcgctatggcaacacacaaagacgacgaggagcgtttttttcccagtaacgggatcctgatttttggcaaacaaaatgctgccagagacaatgcggattacagcgatgtcatgctcaccagcgaggaagaaatcaaaaccactaaccctgtggctacagaggaatacggtatcgtggcagataacttgcagcagcaaaacacggctcctcaaattggaactgtcaacagccagggggccttacccggtatggtctggcagaaccgggacgtgtacctgcagggtcccatctgggccaagattcctcacacggacggcaacttccacccgtctccgctgatgggcggctttggcctgaaacatcctccgcctcagatcctgatcaagaacacgcctgtacctgcggatcctccgaccaccttcaaccagtcaaagctgaactctttcatcacgcaatacagcaccggacaggtcagcgtggaaattgaatgggagctgcagaaggaaaacagcaagcgctggaaccccgagatccagtacacctccaactactacaaatctacaagtgtggactttgctgttaatacagaaggcgtgtactctgaaccccgccccattggcacccgttacctcacccgtaatctgtaattgcctgttaatcaataaaccggttgattcgtttcagttgaactttggtctctgcgaagggcgaattcgtttaaacctgcaggactagagccgaattctgcatcgcgatagggataacagggtaataaataatgtactagagacactttcaataaaggcaaatgcttttatttgtacactctcgggtgattatttacccccacccttgccgtctgcgccgttcagaagtcgaaggggttctgtctggcatcggaatgggccacgggcagagacacgttccggtactggtgcttggtggaccacttgaactcaggcacgaccattctaggcagctctgtgaagttctcgctccacaggctccgcaccatcaccagggcgttcagcaggtcaggggcgctgattttgaagtcgcagttaggtccgccgccctgggctctgctgtttctgtacacagggttgcagcactggaacacaataagagcagggtggtgcacgctggccagcacagacttgtcgctgatcaggtcggcgtcgagatcctcggcgttagacaaggcaaaaggggtcagcttgggcagctggcggcccaggaaaggggcgtggccgggcttgctattgcactcgcatctcagaggcatcagcaggtggccgtggccggtctgggcgttggggtacagggcctgcataaaggccttgatctgtttgaaggccacttgggccttggcgccttcggagaagaacatgccgcagcttttgccgctgaactggttggcggggcaggcggcgtcgtgcacacaacaccgggcgtcggtattgctgatctgcaccacgtttctgccccatctgttcttcacgatcttggccttgctgctctgctctttcagggccctctggccgttctcagaggtgacgtccatctcgatcacatgttccttgttgatcatgatgctgccgtgcagacacttcagctcgccctcgatttccgcgcatctgtgcagccacagggcacaaccggtaggctcgtggtgcttgtatgtcacctcagcaaaagattgcaggtaggcttgcaggaatctgcccatcatggtcacgaaggtcttgttggaggtaaaagtcagctgcagtcctctgtgttcctcgttcagccatgtcttgcacacggcggccagagcctcgacctgatctggcagcagcttgaaattagccttcaggtcgttgtccacgtgatacttatccatcagtgctctggcggcttccatgcccttctcccaggcggaaacgatgggcacgctcagggggttcatcacggtgatctcgctttcagcttctgaaggttcctcctcttcctcctgtgttctcatgccccgagccacggggtcgtcctcattcagtctccgcacggttctttttcctccctttccgtgcttaatcagtacaggaggattagagaagcccaccatctggagggcgacgtcctccctttcttcttcgctatccacgatcacttctgggctggggggccgttcaggctttgggctaggccgtttttttttcttcttaggggcgatagccagatcagcggcgcttgtagagggccgaggactaggggttctaggcacgagggcgtcctggctgctgtcctcctcatcctcgctctcgatccgtctccgcattctcttcttagggggggcccgcggagggggagggctagggctaggggacgacacatcttccatggttggaggtctgcgagcagcgcctctgcctctctctggtgttgtctcgcgctgttcttcctctctagaggccatttccttctcctataggcagaaaaagatcgttgaaactcactccggggctgtggacgtcggcttaccttcgcaaatttgtacctgaggactaccacgcccacgagattaggttctacgaagaccaatcccgcccgcctaatgcggagcttaccgcctgcgtcattacccagggccacattcttggccaattgcaagccatcaacaaagcccgccaagagtttctgctacgaaagggacggggggtttacttggacccccagtccggcgaggagctcaacccaatccccccgccgccgcagccctatcagcagcagccgcgggcccttgcttcccaggatggcacccaaaaagaagctgcagctgccgccgccacccacggacgaggaggaatactgggacagtcaggcagaggaggttttggacgaggaggaggaggacatgatggaagactgggagagcctagacgaggaagcttccgaggtcgaagaggtgtcagacgaaacaccgtcaccctcggtcgcattcccctcgccggcgccccagaaatcggcaaccggttccagcatggctacaacctccgctcctcaggcgccgccggcactgcccgttcgccgacccaaccgtagatgggacaccactggaaccagggccggtaagtccaagcagccgccgccgttagcccaagagcaacaacagcgccaaggctaccgctcatggcgcgggcacaagaacgccatagttgcttgcttgcaagactgtgggggcaacatctccttcgcccgccgctttcttctctaccatcacggcgtggccttcccccgtaacatcctgcattactaccgtcatctctacagcccatactgcaccggcggcagcggcagcaacagcagcggccacacagaagcaaaggcgaccggatagcaagactctgacaaagcccaagaaatccacagcggcggcagcagcaggaggaggagcgctgcgtctggcgcccaacgaacccgtatcgacccgcgagcttagaaacaggatttttcccactctgtatgctatatttcaacagagcaggggccaagaacaagagctgaaaataaaaaacaggtctctgcgatccctcacccgcagctgcctgtatcacaaaagcgaagatcagcttcggcgcacgctggaagacgcggaggctctcttcagtaaatactgcgcgctgactcttaaggactagtttcgcgccctttctcaaatttaagcgcgaaaactacgtcatctccagcggccacacccggcgccagcacctgttgtcagcgccattttttagggcggagtaacttgtatgtgttgggaattgtagttttcttaaaatgggaagtgacgtaacgtgggaaaacggaagtgacgatttgaggaagttgtgggttttttggctttcgtttctgggcgtaggttcgcgtgcggttttctgggtgttttttgtggactttaaccgttacgtcattttttagtcctatatatactcgctctgcacttggcccttttttacactgtgactgattgagctggtgccgtgtcgagtggtgtttttttaataggttttcttttttactggtaaggctgactgttatgactacgtccggcgttccatttggcatgacactacgaccaacacgatctcggttgtctcggcgcactccgtacagtagggatcgtctacctccttttgagacagaaacccgcgctaccatactggaggatcatccgctgctgcccgaatgtaacactttgacaatgcacaacgtgagttacgtgcgaggtcttccctgcagtgtgggatttacgctgattcaggaatgggttgttccctgggatatggttctaacgcgggaggagcttgtaatcctgaggaagtgtatgcacgtgtgcctgtgttgtgccaacattgatatcatgacgagcatgatgatccatggttacgagtcctgggctctccactgtcattgttccagtcccggttccctgcagtgtatagccggcgggcaggttttggccagctggtttaggatggtggtggatggcgccatgtttaatcagaggtttatatggtaccgggaggtggtgaattacaacatgccaaaagaggtaatgtttatgtccagcgtgtttatgaggggtcgccacttaatctacctgcgcttgtggtatgatggccacgtgggttctgtggtccccgccatgagctttggatacagcgccttgcactgtgggattttgaacaatattgtggtgctgtgctgcagttactgtgctgatttaagtgagatcagggtgcgctgctgtgcccggaggacaaggcgccttatgctgcgggcggtgcgaatcatcgctgaggagaccactgccatgttgtattcctgcaggacggagcggcggcggcagcagtttattcgcgcgctgctgcagcaccaccgccctatcctgatgcacgattatgactctacccccatgtaggcgtggacttctccttcgccgcccgttaagcaaccgcaagttggacagcagcctgtggctcagcagctggacagcgacatgaacttaagtgagctgcccggggagtttattaatatcactgatgagcgtttggctcgacaggaaaccgtgtggaatataacacctaagaatatgtctgttacccatgatatgatgctttttaaggccagccggggagaaaggactgtgtactctgtgtgttgggagggaggtggcaggttgaatactagggttctgtgagtttgattaaggtacggtgatctgtataagctatgtggtggtggggctatactactgaatgaaaaatgacttgaaattttctgcaattgaaaaataaacacgttgaaacataacacaaacgattctttattcttgggcaatgtatgaaaaagtgtaagaggatgtggcaaatatttcattaatgtagttgtggccagaccagtcccatgaaaatgacatagagtatgcacttggagttgtgtctcctgtttcctgtgtaccgtttagtgtaatggttagtgttacaggtttagttttgtctccgtttaagtaaacttgactgacaatgttacttttggcagttttaccgtgagattttggataagctgataggttaggcataaatccaacagcgtttgtataggctgtcgcccctcctgacgcggtaggaggaggggagggtgccctgcatgtctgccgctgctcttgctcttgccgctgctgaggaggggggcgcatctgccgcagcaccggatgcatctgggaaaagcaaaaaaggggctcgtccctgtttccggaggaatttgcaagcggggtcttgcatgacggggaggcaaacccccgttcgccgcagtccggccggtccgagactcgaaccgggggtcccgcgactcaacccttggaaaataaccctccggctacagggagcgagccacttaatgctttcgctttccagcctaaccgcttacgctgcgcgcggccagtggccaaaaaagctagcgcagcagccgccgcgcctggaaggaagccaaaaggagcactcccccgttgtctgacgtcgcacacctgggttcgacacgcgggcggtaaccgcatggatcacggcggacggccggatacggggctcgaaccccggtcgtccgccatgatacccttgcgaatttatccaccagaccacggaagagtgcccgcttacaggctctccttttgcacggtctagagcgtcaacgattgcgcgcgcctgaccggccagagcgtcccgaccatggagcactttttgccgctgcgcaacatctggaaccgcgtccgcgactttccgcgcgcctccaccaccgccgccggcatcacctggatgtccaggtacatctacggatatggcaaacagctattatgggtattatgggtgcggccgcggatcccgggcccgtcgactgcagaggcctgcatgcaagcttggtgtaatcatggtcatagctgtttcctgtgtgaaattgttatccgctcacaattccacacaacatacgagccggaagcataaagtgtaaagcctggggtgcctaatgagtgagctaactcacattaattgcgttgcgctcactgcccgctttccagtcgggaaacctgtcgtgccagctgcattaatgaatcggccaacgcgcggggagaggcggtttgcgtattgggcgctcttccgcttcctcgctcactgactcgctgcgctcggtcgttcggctgcggcgagcggtatcagctcactcaaaggcggtaatacggttatccacagaatcaggggataacgcaggaaagaacatgtgagcaaaaggccagcaaaaggccaggaaccgtaaaaaggccgcgttgctggcgtttttccataggctccgcccccctgacgagcatcacaaaaatcgacgctcaagtcagaggtggcgaaacccgacaggactataaagataccaggcgtttccccctggaagctccctcgtgcgctctcctgttccgaccctgccgcttaccggatacctgtccgcctttctcccttcgggaagcgtggcgctttctcatagctcacgctgtaggtatctcagttcggtgtaggtcgttcgctccaagctgggctgtgtgcacgaaccccccgttcagcccgaccgctgcgccttatccggtaactatcgtcttgagtccaacccggtaagacacgacttatcgccactggcagcagccactggtaacaggattagcagagcgaggtatgtaggcggtgctacagagttcttgaagtggtggcctaactacggctacactagaagaacagtatttggtatctgcgctctgctgaagccagttaccttcggaaaaagagttggtagctcttgatccggcaaacaaaccaccgctggtagcggtggtttttttgtttgcaagcagcagattacgcgcagaaaaaaaggatctcaagaagatcctttgatcttttctacggggtctgacgctcagtggaacgaaaactcacgttaagggattttggtcatgagattatcaaaaaggatcttcacctagaaggtcctgtattagaggtcacgtgagtgttttgcgacattttgcgacaccatgtggtcacgctgggtatttaagcccgagtgagcacgcagggtctccattttgaagcgggaggtttgaacgcgcagccgccatccttttaaattaaaaatgaagttttaaatcaagcccaatctgaataatgttacaaccaattaaccaattctgattagaaaaactcatcgagcatcaaatgaaactgcaatttattcatatcaggattatcaataccatatttttgaaaaagccgtttctgtaatgaaggagaaaactcaccgaggcagttccataggatggcaagatcctggtatcggtctgcgattccgactcgtccaacatcaatacaacctattaatttcccctcgtcaaaaataaggttatcaagtgagaaatcaccatgagtgacgactgaatccggtgagaatggcaaaagtttatgcatttctttccagacttgttcaacaggccagccattacgctcgtcatcaaaatcactcgcatcaaccaaaccgttattcattcgtgattgcgcctgagcgagacgaaatacgcgatcgctgttaaaaggacaattacaaacaggaatcgaatgcaaccggcgcaggaacactgccagcgcatcaacaatattttcacctgaatcaggatattcttctaatacctggaatgctgtttttccggggatcgcagtggtgagtaaccatgcatcatcaggagtacggataaaatgcttgatggtcggaagaggcataaattccgtcagccagtttagtctgaccatctcatctgtaacatcattggcaacgctacctttgccatgtttcagaaacaactctggcgcatcgggcttcccatacaagcgatagattgtcgcacctgattgcccgacattatcgcgagcccatttatacccatataaatcagcatccatgttggaatttaatcgcggcctcgacgtttcccgttgaatatggctcataacaccccttgtattactgtttatgtaagcagacagttttattgttcatgatgatatatttttatcttgtgcaatgtaacatcagagattttgagacacgggccagagctgca

SEQ ID NO: 205 - DNA, 5505 bp, synthetic construct; identical to SEQ ID NO: 106
  source 1..5505: mol_type = other DNA

SEQ ID NO: 206 - DNA, 2217 bp, synthetic construct
  source 1..2217: mol_type = other DNA
atggctgccgatggttatcttccagattggctcgaggacaacctctctgagggcattcgcgagtggtgggcgctgaaacctggagccccgaagcccaaagccaaccagcaaaagcaggacgacggccggggtctggtgcttcctggctacaagtacctcggacccttcaacggactcgacaagggggagcccgtcaacgcggcggacgcagcggccctcgagcacgacaaggcctacgaccagcagctgcaggcgggtgacaatccgtacctgcggtataaccacgccgacgccgagtttcaggagcgtctgcaagaagatacgtcttttgggggcaacctcgggctagcagtcttccaggccaagaagcgggttctcgaacctctcggtctggttgaggaaggcgctaagacggctcctggaaagaagagaccggtagagccatcaccccagcgttctccagactcctctacgggcatcggcaagaaaggccaacagcccgccagaaaaagactcaattttggtcagactggcgactcagagtcagttccagaccctcaacctctcggagaacctccagcagcgccctctggtgtgggacctaatacaatggctgcaggcggtggcgcaccaatggcagacaataacgaaggcgccgacggagtgggtagttcctcgggaaattggcattgcgattccacatggctgggcgacagagtcatcaccaccagcacccgaacctgggccctgcccacctacaacaaccacctctacaagcaaatctccaacgggacatcgggaggagccaccaacgacaacacctacttcggctacagcaccccctgggggtattttgactttaacagattccactgccacttttcaccacgtgactggcagcgactcatcaacaacaactggggattccggcccaagagactcagcttcaagctcttcaacatccaggtcaaggaggtcacgcagaatgaaggcaccaagaccatcgccaataacctcaccagcaccatccaggtgtttacggactcggagtaccagctgccgtacgttctcggctctgcccaccagggctgcctgcctccgttcccggcggacgtgttcatgattccccagtacggctacctaacactcaacaacggtagtcaggccgtgggacgctcctccttctactgcctggaatactttccttcgcagatgctgagaaccggcaacaacttccagtttacttacaccttcgaggacgtgcctttccacagcagctacgcccacagccagagcttggaccggctgatgaatcctctgattgaccagtacctgtactacttgtctcggactcaaacaacaggaggcacggcaaatacgcagactctgggcttcagccaaggtgggcctaatacaatggccaatcaggcaaagaactggctgccaggaccctgttaccgccaacaacgcgtctcaacgacaaccgggcaaaacaacaatagcaactttgcctggactgctgggaccaaataccatctgaatggaagaaattcattggctaatcctggcatcgctatggcaacacacaaagacgacgaggagcgtttttttcccagtaacgggatcctgatttttggcaaacaaaatgctgccagagacaatgcggattacagcgatgtcatgctcaccagcgaggaagaaatcaaaaccactaaccctgtggctacagaggaatacggtatcgtggcagataacttgcagcagcaaaacacggctcctcaaattggaactgtcaacagccagggggccttacccggtatggtctggcagaaccgggacgtgtacctgcagggtcccatctgggccaagattcctcacacggacggcaacttccacccgtctccgctgatgggcggctttggcctgaaacatcctccgcctcagatcctgatcaagaacacgcctgtacctgcggatcctccgaccaccttcaaccagtcaaagctgaactctttcatcacgcaatacagcaccggacaggtcagcgtggaaattgaatgggagctgcagaaggaaaacagcaagcgctggaaccccgagatccagtacacctccaactactacaaatctacaagtgtggactttgctgttaatacagaaggcgtgtactctgaaccccgccccattggcacccgttacctcacccgtaatctgtaa

SEQ ID NO: 207 - DNA, 4099 bp, synthetic construct
  source 1..4099: mol_type = other DNA
atgccggggttttacgagattgtgattaaggtccccagcgaccttgacgagcatctgcccggcatttctgacagctttgtgaactgggtggccgagaaggaatgggagttgccgccagattctgacatggatctgaatctgattgagcaggcacccctgaccgtggccgagaagctgcagcgcgactttctgacggaatggcgccgtgtgagtaaggccccggaggctcttttctttgtgcaatttgagaagggagagagctacttccacatgcacgtgctcgtggaaaccaccggggtgaaatccatggttttgggacgtttcctgagtcagattcgcgaaaaactgattcagagaatttaccgcgggatcgagccgactttgccaaactggttcgcggtcacaaagaccagaaatggcgccggaggcgggaacaaggtggtggatgagtgctacatccccaattacttgctccccaaaacccagcctgagctccagtgggcgtggactaatatggaacagtatttaagcgcctgtttgaatctcacggagcgtaaacggttggtggcgcagcatctgacgcacgtgtcgcagacgcaggagcagaacaaagagaatcagaatcccaattctgatgcgccggtgatcagatcaaaaacttcagccaggtacatggagctggtcgggtggctcgtggacaaggggattacctcggagaagcagtggatccaggaggaccaggcctcatacatctccttcaatgcggcctccaactcgcggtcccaaatcaaggctgccttggacaatgcgggaaagattatgagcctgactaaaaccgcccccgactacctggtgggccagcagcccgtggaggacatttccagcaatcggatttataaaattttggaactaaacgggtacgatccccaatatgcggcttccgtctttctgggatgggccacgaaaaagttcggcaagaggaacaccatctggctgtttgggcctgcaactaccgggaagaccaacatcgcggaggccatagcccacactgtgcccttctacgggtgcgtaaactggaccaatgagaactttcccttcaacgactgtgtcgacaagatggtgatctggtgggaggaggggaagatgaccgccaaggtcgtggagtcggccaaagccattctcggaggaagcaaggtgcgcgtggaccagaaatgcaagtcctcggcccagatagacccgactcccgtgatcgtcacctccaacaccaacatgtgcgccgtgattgacgggaactcaacgaccttcgaacaccagcagccgttgcaagaccggatgttcaaatttgaactcacccgccgtctggatcatgactttgggaaggtcaccaagcaggaagtcaaagactttttccggtgggcaaaggatcacgtggttgaggtggagcatgaattctacgtcaaaaagggtggagccaagaaaagacccgcccccagtgacgcagatataagtgagcccaaacgggtgcgcgagtcagttgcgcagccatcgacgtcagacgcggaagcttcgatcaactacgcagacaggtaccaaaacaaatgttctcgtcacgtgggcatgaatctgatgctgtttccctgcagacaatgcgagagaatgaatcagaattcaaatatctgcttcactcacggacagaaagactgtttagagtgctttcccgtgtcagaatctcaacccgtttctgtcgtcaaaaaggcgtatcagaaactgtgctacattcatcatatcatgggaaaggtgccagacgcttgcactgcctgcgatctggtcaatgtggatttggatgactgcatctttgaacaataaatgatttaaatcaggtatggctgccgatggttatcttccagattggctcgaggacaacctctctgagggcattcgcgagtggtgggcgctgaaacctggagccccgaagcccaaagccaaccagcaaaagcaggacgacggccggggtctggtgcttcctggctacaagtacctcggacccttcaacggactcgacaagggggagcccgtcaacgcggcggacgcagcggccctcgagcacgacaaggcctacgaccagcagctgcaggcgggtgacaatccgtacctgcggtataaccacgccgacgccgagtttcaggagcgtctgcaagaagatacgtcttttgggggcaacctcgggctagcagtcttccaggccaagaagcgggttctcgaacctctcggtctggttgaggaaggcgctaagacggctcctggaaagaagagaccggtagagccatcaccccagcgttctccagactcctctacgggcatcggcaagaaaggccaacagcccgccagaaaaagactcaattttggtcagactggcgactcagagtcagttccagaccctcaacctctcggagaacctccagcagcgccctctggtgtgggacctaatacaatggctgcaggcggtggcgcaccaatggcagacaataacgaaggcgccgacggagtgggtagttcctcgggaaattggcattgcgattccacatggctgggcgacagagtcatcaccaccagcacccgaacctgggccctgcccacctacaacaaccacctctacaagcaaatctccaacgggacatcgggaggagccaccaacgacaacacctacttcggctacagcaccccctgggggtattttgactttaacagattccactgccacttttcaccacgtgactggcagcgactcatcaacaacaactggggattccggcccaagagactcagcttcaagctcttcaacatccaggtcaaggaggtcacgcagaatgaaggcaccaagaccatcgccaataacctcaccagcaccatccaggtgtttacggactcggagtaccagctgccgtacgttctcggctctgcccaccagggctgcctgcctccgttcccggcggacgtgttcatgattccccagtacggctacctaacactcaacaacggtagtcaggccgtgggacgctcctccttctactgcctggaatactttccttcgcagatgctgagaaccggcaacaacttccagtttacttacaccttcgaggacgtgcctttccacagcagctacgcccacagccagagcttggaccggctgatgaatcctctgattgaccagtacctgtactacttgtctcggactcaaacaacaggaggcacggcaaatacgcagactctgggcttcagccaaggtgggcctaatacaatggccaatcaggcaaagaactggctgccaggaccctgttaccgccaacaacgcgtctcaacgacaaccgggcaaaacaacaatagcaactttgcctggactgctgggaccaaataccatctgaatggaagaaattcattggctaatcctggcatcgctatggcaacacacaaagacgacgaggagcgtttttttcccagtaacgggatcctgatttttggcaaacaaaatgctgccagagacaatgcggattacagcgatgtcatgctcaccagcgaggaagaaatcaaaaccactaaccctgtggctacagaggaatacggtatcgtggcagataacttgcagcagcaaaacacggctcctcaaattggaactgtcaacagccagggggccttacccggtatggtctggcagaaccgggacgtgtacctgcagggtcccatctgggccaagattcctcacacggacggcaacttccacccgtctccgctgatgggcggctttggcctgaaacatcctccgcctcagatcctgatcaagaacacgcctgtacctgcggatcctccgaccaccttcaaccagtcaaagctgaactctttcatcacgcaatacagcaccggacaggtcagcgtggaaattgaatgggagctgcagaaggaaaacagcaagcgctggaaccccgagatccagtacacctccaactactacaaatctacaagtgtggactttgctgttaatacagaaggcgtgtactctgaaccccgccccattggcacccgttacctcacccgtaatctgtaa

SEQ ID NO: 208 - DNA, 9825 bp, synthetic construct
  source 1..9825: mol_type = other DNA
atgccggggttttacgagattgtgattaaggtccccagcgaccttgacgagcatctgcccggcatttctgacagctttgtgaactgggtggccgagaaggaatgggagttgccgccagattctgacatggatctgaatctgattgagcaggcacccctgaccgtggccgagaagctgcagcgcgactttctgacggaatggcgccgtgtgagtaaggccccggaggctcttttctttgtgcaatttgagaagggagagagctacttccacatgcacgtgctcgtggaaaccaccggggtgaaatccatggttttgggacgtttcctgagtcagattcgcgaaaaactgattcagagaatttaccgcgggatcgagccgactttgccaaactggttcgcggtcacaaagaccagaaatggcgccggaggcgggaacaaggtggtggatgagtgctacatccccaattacttgctccccaaaacccagcctgagctccagtgggcgtggactaatatggaacagtatttaagcgcctgtttgaatctcacggagcgtaaacggttggtggcgcagcatctgacgcacgtgtcgcagacgcaggagcagaacaaagagaatcagaatcccaattctgatgcgccggtgatcagatcaaaaacttcagccaggtacatggagctggtcgggtggctcgtggacaaggggattacctcggagaagcagtggatccaggaggaccaggcctcatacatctccttcaatgcggcctccaactcgcggtcccaaatcaaggctgccttggacaatgcgggaaagattatgagcctgactaaaaccgcccccgactacctggtgggccagcagcccgtggaggacatttccagcaatcggatttataaaattttggaactaaacgggtacgatccccaatatgcggcttccgtctttctgggatgggccacgaaaaagttcggcaagaggaacaccatctggctgtttgggcctgcaactaccgggaagaccaacatcgcggaggccatagcccacactgtgcccttctacgggtgcgtaaactggaccaatgagaactttcccttcaacgactgtgtcgacaagatggtgatctggtgggaggaggggaagatgaccgccaaggtcgtggagtcggccaaagccattctcggaggaagcaaggtgcgcgtggaccagaaatgcaagtcctcggcccagatagacccgactcccgtgatcgtcacctccaacaccaacatgtgcgccgtgattgacgggaactcaacgaccttcgaacaccagcagccgttgcaagaccggatgttcaaatttgaactcacccgccgtctggatcatgactttgggaaggtcaccaagcaggaagtcaaagactttttccggtgggcaaaggatcacgtggttgaggtggagcatgaattctacgtcaaaaagggtggagccaagaaaagacccgcccccagtgacgcagatataagtgagcccaaacgggtgcgcgagtcagttgcgcagccatcgacgtcagacgcggaagcttcgatcaactacgcagacaggtaccaaaacaaatgttctcgtcacgtgggcatgaatctgatgctgtttccctgcagacaatgcgagagaatgaatcagaattcaaatatctgcttcactcacggacagaaagactgtttagagtgctttcccgtgtcagaatctcaacccgtttctgtcgtcaaaaaggcgtatcagaaactgtgctacattcatcatatcatgggaaaggtgccagacgcttgcactgcctgcgatctggtcaatgtggatttggatgactgcatctttgaacaataaatgatttaaatcaggtatggctgccgatggttatcttccagattggctcgaggacaacctctctgagggcattcgcgagtggtgggcgctgaaacctggagccccgaagcccaaagccaaccagcaaaagcaggacgacggccggggtctggtgcttcctggctacaagtacctcggacccttcaacggactcgacaagggggagcccgtcaacgcggcggacgcagcggccctcgagcacgacaaggcctacgaccagcagctgcaggcgggtgacaatccgtacctgcggtataaccacgccgacgccgagtttcaggagcgtctgcaagaagatacgtcttttgggggcaacctcgggctagcagtcttccaggccaagaagcgggttctcgaacctctcggtctggttgaggaaggcgctaagacggctcctggaaagaagagaccggtagagccatcaccccagcgttctccagactcctctacgggcatcggcaagaaaggccaacagcccgccagaaaaagactcaattttggtcagactggcgactcagagtcagttccagaccctcaacctctcggagaacctccagcagcgccctctggtgtgggacctaatacaatggctgcaggcggtggcgcaccaatggcagacaataacgaaggcgccgacggagtgggtagttcctcgggaaattggcattgcgattccacatggctgggcgacagagtcatcaccaccagcacccgaacctgggccctgcccacctacaacaaccacctctacaagcaaatctccaacgggacatcgggaggagccaccaacgacaacacctacttcggctacagcaccccctgggggtattttgactttaacagattccactgccacttttcaccacgtgactggcagcgactcatcaacaacaactggggattccggcccaagagactcagcttcaagctcttcaacatccaggtcaaggaggtcacgcagaatgaaggcaccaagaccatcgccaataacctcaccagcaccatccaggtgtttacggactcggagtaccagctgccgtacgttctcggctctgcccaccagggctgcctgcctccgttcccggcggacgtgttcatgattccccagtacggctacctaacactcaacaacggtagtcaggccgtgggacgctcctccttctactgcctggaatactttccttcgcagatgctgagaaccggcaacaacttccagtttacttacaccttcgaggacgtgcctttccacagcagctacgcccacagccagagcttggaccggctgatgaatcctctgattgaccagtacctgtactacttgtctcggactcaaacaacaggaggcacggcaaatacgcagactctgggcttcagccaaggtgggcctaatacaatggccaatcaggcaaagaactggctgccaggaccctgttaccgccaacaacgcgtctcaacgacaaccgggcaaaacaacaatagcaactttgcctggactgctgggaccaaataccatctgaatggaagaaattcattggctaatcctggcatcgctatggcaacacacaaagacgacgaggagcgtttttttcccagtaacgggatcctgatttttggcaaacaaaatgctgccagagacaatgcggattacagcgatgtcatgctcaccagcgaggaagaaatcaaaaccactaaccctgtggctacagaggaatacggtatcgtggcagataacttgcagcagcaaaacacggctcctcaaattggaactgtcaacagccagggggccttacccggtatggtctggcagaaccgggacgtgtacctgcagggtcccatctgggccaagattcctcacacggacggcaacttccacccgtctccgctgatgggcggctttggcctgaaacatcctccgcctcagatcctgatcaagaacacgcctgtacctgcggatcctccgaccaccttcaaccagtcaaagctgaactctttcatcacgcaatacagcaccggacaggtcagcgtggaaattgaatgggagctgcagaaggaaaacagcaagcgctggaaccccgagatccagtacacctccaactactacaaatctacaagtgtggactttgctgttaatacagaaggcgtgtactctgaaccccgccccattggcacccgttacctcacccgtaatctgtaattgcctgttaatcaataaaccggttgattcgtttcagttgaactttggtctctgcgaagggcgaattcgtttaaacctgcaggactagagccgaattctgcatcgcgatagggataacagggtaataaataatgtactagagacactttcaataaaggcaaatgcttttatttgtacactctcgggtgattatttacccccacccttgccgtctgcgccgttcagaagtcgaaggggttctgtctggcatcggaatgggccacgggcagagacacgttccggtactggtgcttggtggaccacttgaactcaggcacgaccattctaggcagctctgtgaagttctcgctccacaggctccgcaccatcaccagggcgttcagcaggtcaggggcgctgattttgaagtcgcagttaggtccgccgccctgggctctgctgtttctgtacacagggttgcagcactggaacacaataagagcagggtggtgcacgctggccagcacagacttgtcgctgatcaggtcggcgtcgagatcctcggcgttagacaaggcaaaaggggtcagcttgggcagctggcggcccaggaaaggggcgtggccgggcttgctattgcactcgcatctcagaggcatcagcaggtggccgtggccggtctgggcgttggggtacagggcctgcataaaggccttgatctgtttgaaggccacttgggccttggcgccttcggagaagaacatgccgcagcttttgccgctgaactggttggcggggcaggcggcgtcgtgcacacaacaccgggcgtcggtattgctgatctgcaccacgtttctgccccatctgttcttcacgatcttggccttgctgctctgctctttcagggccctctggccgttctcagaggtgacgtccatctcgatcacatgttccttgttgatcatgatgctgccgtgcagacacttcagctcgccctcgatttccgcgcatctgtgcagccacagggcacaaccggtaggctcgtggtgcttgtatgtcacctcagcaaaagattgcaggtaggcttgcaggaatctgcccatcatggtcacgaaggtcttgttggaggtaaaagtcagctgcagtcctctgtgttcctcgttcagccatgtcttgcacacggcggccagagcctcgacctgatctggcagcagcttgaaattagccttcaggtcgttgtccacgtgatacttatccatcagtgctctggcggcttccatgcccttctcccaggcggaaacgatgggcacgctcagggggttcatcacggtgatctcgctttcagcttctgaaggttcctcctcttcctcctgtgttctcatgccccgagccacggggtcgtcctcattcagtctccgcacggttctttttcctccctttccgtgcttaatcagtacaggaggattagagaagcccaccatctggagggcgacgtcctccctttcttcttcgctatccacgatcacttctgggctggggggccgttcaggctttgggctaggccgtttttttttcttcttaggggcgatagccagatcagcggcgcttgtagagggccgaggactaggggttctaggcacgagggcgtcctggctgctgtcctcctcatcctcgctctcgatccgtctccgcattctcttcttagggggggcccgcggagggggagggctagggctaggggacgacacatcttccatggttggaggtctgcgagcagcgcctctgcctctctctggtgttgtctcgcgctgttcttcctctctagaggccatttccttctcctataggcagaaaaagatcgttgaaactcactccggggctgtggacgtcggcttaccttcgcaaatttgtacctgaggactaccacgcccacgagattaggttctacgaagaccaatcccgcccgcctaatgcggagcttaccgcctgcgtcattacccagggccacattcttggccaattgcaagccatcaacaaagcccgccaagagtttctgctacgaaagggacggggggtttacttggacccccagtccggcgaggagctcaacccaatccccccgccgccgcagccctatcagcagcagccgcgggcccttgcttcccaggatggcacccaaaaagaagctgcagctgccgccgccacccacggacgaggaggaatactgggacagtcaggcagaggaggttttggacgaggaggaggaggacatgatggaagactgggagagcctagacgaggaagcttccgaggtcgaagaggtgtcagacgaaacaccgtcaccctcggtcgcattcccctcgccggcgccccagaaatcggcaaccggttccagcatggctacaacctccgctcctcaggcgccgccggcactgcccgttcgccgacccaaccgtagatgggacaccactggaaccagggccggtaagtccaagcagccgccgccgttagcccaagagcaacaacagcgccaaggctaccgctcatggcgcgggcacaagaacgccatagttgcttgcttgcaagactgtgggggcaacatctccttcgcccgccgctttcttctctaccatcacggcgtggccttcccccgtaacatcctgcattactaccgtcatctctacagcccatactgcaccggcggcagcggcagcaacagcagcggccacacagaagcaaaggcgaccggatagcaagactctgacaaagcccaagaaatccacagcggcggcagcagcaggaggaggagcgctgcgtctggcgcccaacgaacccgtatcgacccgcgagcttagaaacaggatttttcccactctgtatgctatatttcaacagagcaggggccaagaacaagagctgaaaataaaaaacaggtctctgcgatccctcacccgcagctgcctgtatcacaaaagcgaagatcagcttcggcgcacgctggaagacgcggaggctctcttcagtaaatactgcgcgctgactcttaaggactagtttcgcgccctttctcaaatttaagcgcgaaaactacgtcatctccagcggccacacccggcgccagcacctgttgtcagcgccattttttagggcggagtaacttgtatgtgttgggaattgtagttttcttaaaatgggaagtgacgtaacgtgggaaaacggaagtgacgatttgaggaagttgtgggttttttggctttcgtttctgggcgtaggttcgcgtgcggttttctgggtgttttttgtggactttaaccgttacgtcattttttagtcctatatatactcgctctgcacttggcccttttttacactgtgactgattgagctggtgccgtgtcgagtggtgtttttttaataggttttcttttttactggtaaggctgactgttatgactacgtccggcgttccatttggcatgacactacgaccaacacgatctcggttgtctcggcgcactccgtacagtagggatcgtctacctccttttgagacagaaacccgcgctaccatactggaggatcatccgctgctgcccgaatgtaacactttgacaatgcacaacgtgagttacgtgcgaggtcttccctgcagtgtgggatttacgctgattcaggaatgggttgttccctgggatatggttctaacgcgggaggagcttgtaatcctgaggaagtgtatgcacgtgtgcctgtgttgtgccaacattgatatcatgacgagcatgatgatccatggttacgagtcctgggctctccactgtcattgttccagtcccggttccctgcagtgtatagccggcgggcaggttttggccagctggtttaggatggtggtggatggcgccatgtttaatcagaggtttatatggtaccgggaggtggtgaattacaacatgccaaaagaggtaatgtttatgtccagcgtgtttatgaggggtcgccacttaatctacctgcgcttgtggtatgatggccacgtgggttctgtggtccccgccatgagctttggatacagcgccttgcactgtgggattttgaacaatattgtggtgctgtgctgcagttactgtgctgatttaagtgagatcagggtgcgctgctgtgcccggaggacaaggcgccttatgctgcgggcggtgcgaatcatcgctgaggagaccactgccatgttgtattcctgcaggacggagcggcggcggcagcagtttattcgcgcgctgctgcagcaccaccgccctatcctgatgcacgattatgactctacccccatgtaggcgtggacttctccttcgccgcccgttaagcaaccgcaagttggacagcagcctgtggctcagcagctggacagcgacatgaacttaagtgagctgcccggggagtttattaatatcactgatgagcgtttggctcgacaggaaaccgtgtggaatataacacctaagaatatgtctgttacccatgatatgatgctttttaaggccagccggggagaaaggactgtgtactctgtgtgttgggagggaggtggcaggttgaatactagggttctgtgagtttgattaaggtacggtgatctgtataagctatgtggtggtggggctatactactgaatgaaaaatgacttgaaattttctgcaattgaaaaataaacacgttgaaacataacacaaacgattctttattcttgggcaatgtatgaaaaagtgtaagaggatgtggcaaatatttcattaatgtagttgtggccagaccagtcccatgaaaatgacatagagtatgcacttggagttgtgtctcctgtttcctgtgtaccgtttagtgtaatggttagtgttacaggtttagttttgtctccgtttaagtaaacttgactgacaatgttacttttggcagttttaccgtgagattttggataagctgataggttaggcataaatccaacagcgtttgtataggctgtcgcccctcctgacgcggtaggaggaggggagggtgccctgcatgtctgccgctgctcttgctcttgccgctgctgaggaggggggcgcatctgccgcagcaccggatgcatctgggaaaagcaaaaaaggggctcgtccctgtttccggaggaatttgcaagcggggtcttgcatgacggggaggcaaacccccgttcgccgcagtccggccggtccgagactcgaaccgggggtcccgcgactcaacccttggaaaataaccctccggctacagggagcgagccacttaatgctttcgctttccagcctaaccgcttacgctgcgcgcggccagtggccaaaaaagctagcgcagcagccgccgcgcctggaaggaagccaaaaggagcactcccccgttgtctgacgtcgcacacctgggttcgacacgcgggcggtaaccgcatggatcacggcggacggccggatacggggctcgaaccccggtcgtccgccatgatacccttgcgaatttatccaccagaccacggaagagtgcccgcttacaggctctccttttgcacggtctagagcgtcaacgattgcgcgcgcctgaccggccagagcgtcccgaccatggagcactttttgccgctgcgcaacatctggaaccgcgtccgcgactttccgcgcgcctccaccaccgccgccggcatcacctggatgtccaggtacatctacggata

SEQ ID NO: 209 - DNA, 12588 bp, synthetic construct
  source 1..12588: mol_type = other DNA
tcgcgcgtttcggtgatgacggtgaaaacctctgacacatgcagctcccggagacggtcacagcttgtctgtaagcggatgccgggagcagacaagcccgtcagggcgcgtcagcgggtgttggcgggtgtcggggctggcttaactatgcggcatcagagcagattgtactgagagtgcaccatatgcggtgtgaaataccgcacagatgcgtaaggagaaaataccgcatcaggcgccattcgccattcaggctgcgcaactgttgggaagggcgatcggtgcgggcctcttcgctattacgccagctggcgaaagggggatgtgctgcaaggcgattaagttgggtaacgccagggttttcccagtcacgacgttgtaaaacgacggccagagaattccgcagggtctccattttgaagcgggaggtttgaacgcgcagccgccatgccggggttttacgagattgtgattaaggtccccagcgaccttgacgagcatctgcccggcatttctgacagctttgtgaactgggtggccgagaaggaatgggagttgccgccagattctgacatggatctgaatctgattgagcaggcacccctgaccgtggccgagaagctgcagcgcgactttctgacggaatggcgccgtgtgagtaaggccccggaggctcttttctttgtgcaatttgagaagggagagagctacttccacatgcacgtgctcgtggaaaccaccggggtgaaatccatggttttgggacgtttcctgagtcagattcgcgaaaaactgattcagagaatttaccgcgggatcgagccgactttgccaaactggttcgcggtcacaaagaccagaaatggcgccggaggcgggaacaaggtggtggatgagtgctacatccccaattacttgctccccaaaacccagcctgagctccagtgggcgtggactaatatggaacagtatttaagcgcctgtttgaatctcacggagcgtaaacggttggtggcgcagcatctgacgcacgtgtcgcagacgcaggagcagaacaaagagaatcagaatcccaattctgatgcgccggtgatcagatcaaaaacttcagccaggtacatggagctggtcgggtggctcgtggacaaggggattacctcggagaagcagtggatccaggaggaccaggcctcatacatctccttcaatgcggcctccaactcgcggtcccaaatcaaggctgccttggacaatgcgggaaagattatgagcctgactaaaaccgcccccgactacctggtgggccagcagcccgtggaggacatttccagcaatcggatttataaaattttggaactaaacgggtacgatccccaatatgcggcttccgtctttctgggatgggccacgaaaaagttcggcaagaggaacaccatctggctgtttgggcctgcaactaccgggaagaccaacatcgcggaggccatagcccacactgtgcccttctacgggtgcgtaaactggaccaatgagaactttcccttcaacgactgtgtcgacaagatggtgatctggtgggaggaggggaagatgaccgccaaggtcgtggagtcggccaaagccattctcggaggaagcaaggtgcgcgtggaccagaaatgcaagtcctcggcccagatagacccgactcccgtgatcgtcacctccaacaccaacatgtgcgccgtgattgacgggaactcaacgaccttcgaacaccagcagccgttgcaagaccggatgttcaaatttgaactcacccgccgtctggatcatgactttgggaaggtcaccaagcaggaagtcaaagactttttccggtgggcaaaggatcacgtggttgaggtggagcatgaattctacgtcaaaaagggtggagccaagaaaagacccgcccccagtgacgcagatataagtgagcccaaacgggtgcgcgagtcagttgcgcagccatcgacgtcagacgcggaagcttcgatcaactacgcagacaggtaccaaaacaaatgttctcgtcacgtgggcatgaatctgatgctgtttccctgcagacaatgcgagagaatgaatcagaattcaaatatctgcttcactcacggacagaaagactgtttagagtgctttcccgtgtcagaatctcaacccgtttctgtcgtcaaaaaggcgtatcagaaactgtgctacattcatcatatcatgggaaaggtgccagacgcttgcactgcctgcgatctggtcaatgtggatttggatgactgcatctttgaacaataaatgatttaaatcaggtatggctgccgatggttatcttccagattggctcgaggacaacctctctgagggcattcgcgagtggtgggcgctgaaacctggagccccgaagcccaaagccaaccagcaaaagcaggacgacggccggggtctggtgcttcctggctacaagtacctcggacccttcaacggactcgacaagggggagcccgtcaacgcggcggacgcagcggccctcgagcacgacaaggcctacgaccagcagctgcaggcgggtgacaatccgtacctgcggtataaccacgccgacgccgagtttcaggagcgtctgcaagaagatacgtcttttgggggcaacctcgggctagcagtcttccaggccaagaagcgggttctcgaacctctcggtctggttgaggaaggcgctaagacggctcctggaaagaagagaccggtagagccatcaccccagcgttctccagactcctctacgggcatcggcaagaaaggccaacagcccgccagaaaaagactcaattttggtcagactggcgactcagagtcagttccagaccctcaacctctcggagaacctccagcagcgccctctggtgtgggacctaatacaatggctgcaggcggtggcgcaccaatggcagacaataacgaaggcgccgacggagtgggtagttcctcgggaaattggcattgcgattccacatggctgggcgacagagtcatcaccaccagcacccgaacctgggccctgcccacctacaacaaccacctctacaagcaaatctccaacgggacatcgggaggagccaccaacgacaacacctacttcggctacagcaccccctgggggtattttgactttaacagattccactgccacttttcaccacgtgactggcagcgactcatcaacaacaactggggattccggcccaagagactcagcttcaagctcttcaacatccaggtcaaggaggtcacgcagaatgaaggcaccaagaccatcgccaataacctcaccagcaccatccaggtgtttacggactcggagtaccagctgccgtacgttctcggctctgcccaccagggctgcctgcctccgttcccggcggacgtgttcatgattccccagtacggctacctaacactcaacaacggtagtcaggccgtgggacgctcctccttctactgcctggaatactttccttcgcagatgctgagaaccggcaacaacttccagtttacttacaccttcgaggacgtgcctttccacagcagctacgcccacagccagagcttggaccggctgatgaatcctctgattgaccagtacctgtactacttgtctcggactcaaacaacaggaggcacggcaaatacgcagactctgggcttcagccaaggtgggcctaatacaatggccaatcaggcaaagaactggctgccaggaccctgttaccgccaacaacgcgtctcaacgacaaccgggcaaaacaacaatagcaactttgcctggactgctgggaccaaataccatctgaatggaagaaattcattggctaatcctggcatcgctatggcaacacacaaagacgacgaggagcgtttttttcccagtaacgggatcctgatttttggcaaacaaaatgctgccagagacaatgcggattacagcgatgtcatgctcaccagcgaggaagaaatcaaaaccactaaccctgtggctacagaggaatacggtatcgtggcagataacttgcagcagcaaaacacggctcctcaaattggaactgtcaacagccagggggccttacccggtatggtctggcagaaccgggacgtgtacctgcagggtcccatctgggccaagattcctcacacggacggcaacttccacccgtctccgctgatgggcggctttggcctgaaacatcctccgcctcagatcctgatcaagaacacgcctgtacctgcggatcctccgaccaccttcaaccagtcaaagctgaactctttcatcacgcaatacagcaccggacaggtcagcgtggaaattgaatgggagctgcagaaggaaaacagcaagcgctggaaccccgagatccagtacacctccaactactacaaatctacaagtgtggactttgctgttaatacagaaggcgtgtactctgaaccccgccccattggcacccgttacctcacccgtaatctgtaattgcctgttaatcaataaaccggttgattcgtttcagttgaactttggtctctgcgaagggcgaattcgtttaaacctgcaggactagagccgaattctgcatcgcgatagggataacagggtaataaataatgtactagagacactttcaataaaggcaaatgcttttatttgtacactctcgggtgattatttacccccacccttgccgtctgcgccgttcagaagtcgaaggggttctgtctggcatcggaatgggccacgggcagagacacgttccggtactggtgcttggtggaccacttgaactcaggcacgaccattctaggcagctctgtgaagttctcgctccacaggctccgcaccatcaccagggcgttcagcaggtcaggggcgctgattttgaagtcgcagttaggtccgccgccctgggctctgctgtttctgtacacagggttgcagcactggaacacaataagagcagggtggtgcacgctggccagcacagacttgtcgctgatcaggtcggcgtcgagatcctcggcgttagacaaggcaaaaggggtcagcttgggcagctggcggcccaggaaaggggcgtggccgggcttgctattgcactcgcatctcagaggcatcagcaggtggccgtggccggtctgggcgttggggtacagggcctgcataaaggccttgatctgtttgaaggccacttgggccttggcgccttcggagaagaacatgccgcagcttttgccgctgaactggttggcggggcaggcggcgtcgtgcacacaacaccgggcgtcggtattgctgatctgcaccacgtttctgccccatctgttcttcacgatcttggccttgctgctctgctctttcagggccctctggccgttctcagaggtgacgtccatctcgatcacatgttccttgttgatcatgatgctgccgtgcagacacttcagctcgccctcgatttccgcgcatctgtgcagccacagggcacaaccggtaggctcgtggtgcttgtatgtcacctcagcaaaagattgcaggtaggcttgcaggaatctgcccatcatggtcacgaaggtcttgttggaggtaaaagtcagctgcagtcctctgtgttcctcgttcagccatgtcttgcacacggcggccagagcctcgacctgatctggcagcagcttgaaattagccttcaggtcgttgtccacgtgatacttatccatcagtgctctggcggcttccatgcccttctcccaggcggaaacgatgggcacgctcagggggttcatcacggtgatctcgctttcagcttctgaaggttcctcctcttcctcctgtgttctcatgccccgagccacggggtcgtcctcattcagtctccgcacggttctttttcctccctttccgtgcttaatcagtacaggaggattagagaagcccaccatctggagggcgacgtcctccctttcttcttcgctatccacgatcacttctgggctggggggccgttcaggctttgggctaggccgtttttttttcttcttaggggcgatagccagatcagcggcgcttgtagagggccgaggactaggggttctaggcacgagggcgtcctggctgctgtcctcctcatcctcgctctcgatccgtctccgcattctcttcttagggggggcccgcggagggggagggctagggctaggggacgacacatcttccatggttggaggtctgcgagcagcgcctctgcctctctctggtgttgtctcgcgctgttcttcctctctagaggccatttccttctcctataggcagaaaaagatcgttgaaactcactccggggctgtggacgtcggcttaccttcgcaaatttgtacctgaggactaccacgcccacgagattaggttctacgaagaccaatcccgcccgcctaatgcggagcttaccgcctgcgtcattacccagggccacattcttggccaattgcaagccatcaacaaagcccgccaagagtttctgctacgaaagggacggggggtttacttggacccccagtccggcgaggagctcaacccaatccccccgccgccgcagccctatcagcagcagccgcgggcccttgcttcccaggatggcacccaaaaagaagctgcagctgccgccgccacccacggacgaggaggaatactgggacagtcaggcagaggaggttttggacgaggaggaggaggacatgatggaagactgggagagcctagacgaggaagcttccgaggtcgaagaggtgtcagacgaaacaccgtcaccctcggtcgcattcccctcgccggcgccccagaaatcggcaaccggttccagcatggctacaacctccgctcctcaggcgccgccggcactgcccgttcgccgacccaaccgtagatgggacaccactggaaccagggccggtaagtccaagcagccgccgccgttagcccaagagcaacaacagcgccaaggctaccgctcatggcgcgggcacaagaacgccatagttgcttgcttgcaagactgtgggggcaacatctccttcgcccgccgctttcttctctaccatcacggcgtggccttcccccgtaacatcctgcattactaccgtcatctctacagcccatactgcaccggcggcagcggcagcaacagcagcggccacacagaagcaaaggcgaccggatagcaagactctgacaaagcccaagaaatccacagcggcggcagcagcaggaggaggagcgctgcgtctggcgcccaacgaacccgtatcgacccgcgagcttagaaacaggatttttcccactctgtatgctatatttcaacagagcaggggccaagaacaagagctgaaaataaaaaacaggtctctgcgatccctcacccgcagctgcctgtatcacaaaagcgaagatcagcttcggcgcacgctggaagacgcggaggctctcttcagtaaatactgcgcgctgactcttaaggactagtttcgcgccctttctcaaatttaagcgcgaaaactacgtcatctccagcggccacacccggcgccagcacctgttgtcagcgccattttttagggcggagtaacttgtatgtgttgggaattgtagttttcttaaaatgggaagtgacgtaacgtgggaaaacggaagtgacgatttgaggaagttgtgggttttttggctttcgtttctgggcgtaggttcgcgtgcggttttctgggtgttttttgtggactttaaccgttacgtcattttttagtcctatatatactcgctctgcacttggcccttttttacactgtgactgattgagctggtgccgtgtcgagtggtgtttttttaataggttttcttttttactggtaaggctgactgttatgactacgtccggcgttccatttggcatgacactacgaccaacacgatctcggttgtctcggcgcactccgtacagtagggatcgtctacctccttttgagacagaaacccgcgctaccatactggaggatcatccgctgctgcccgaatgtaacactttgacaatgcacaacgtgagttacgtgcgaggtcttccctgcagtgtgggatttacgctgattcaggaatgggttgttccctgggatatggttctaacgcgggaggagcttgtaatcctgaggaagtgtatgcacgtgtgcctgtgttgtgccaacattgatatcatgacgagcatgatgatccatggttacgagtcctgggctctccactgtcattgttccagtcccggttccctgcagtgtatagccggcgggcaggttttggccagctggtttaggatggtggtggatggcgccatgtttaatcagaggtttatatggtaccgggaggtggtgaattacaacatgccaaaagaggtaatgtttatgtccagcgtgtttatgaggggtcgccacttaatctacctgcgcttgtggtatgatggccacgtgggttctgtggtccccgccatgagctttggatacagcgccttgcactgtgggattttgaacaatattgtggtgctgtgctgcagttactgtgctgatttaagtgagatcagggtgcgctgctgtgcccggaggacaaggcgccttatgctgcgggcggtgcgaatcatcgctgaggagaccactgccatgttgtattcctgcaggacggagcggcggcggcagcagtttattcgcgcgctgctgcagcaccaccgccctatcctgatgcacgattatgactctacccccatgtaggcgtggacttctccttcgccgcccgttaagcaaccgcaagttggacagcagcctgtggctcagcagctggacagcgacatgaacttaagtgagctgcccggggagtttattaatatcactgatgagcgtttggctcgacaggaaaccgtgtggaatataacacctaagaatatgtctgttacccatgatatgatgctttttaaggccagccggggagaaaggactgtgtactctgtgtgttgggagggaggtggcaggttgaatactagggttctgtgagtttgattaaggtacggtgatctgtataagctatgtggtggtggggctatactactgaatgaaaaatgacttgaaattttctgcaattgaaaaataaacacgttgaaacataacacaaacgattctttattcttgggcaatgtatgaaaaagtgtaagaggatgtggcaaatatttcattaatgtagttgtggccagaccagtcccatgaaaatgacatagagtatgcacttggagttgtgtctcctgtttcctgtgtaccgtttagtgtaatggttagtgttacaggtttagttttgtctccgtttaagtaaacttgactgacaatgttacttttggcagttttaccgtgagattttggataagctgataggttaggcataaatccaacagcgtttgtataggctgtcgcccctcctgacgcggtaggaggaggggagggtgccctgcatgtctgccgctgctcttgctcttgccgctgctgaggaggggggcgcatctgccgcagcaccggatgcatctgggaaaagcaaaaaaggggctcgtccctgtttccggaggaatttgcaagcggggtcttgcatgacggggaggcaaacccccgttcgccgcagtccggccggtccgagactcgaaccgggggtcccgcgactcaacccttggaaaataaccctccggctacagggagcgagccacttaatgctttcgctttccagcctaaccgcttacgctgcgcgcggccagtggccaaaaaagctagcgcagcagccgccgcgcctggaaggaagccaaaaggagcactcccccgttgtctgacgtcgcacacctgggttcgacacgcgggcggtaaccgcatggatcacggcggacggccggatacggggctcgaaccccggtcgtccgccatgatacccttgcgaatttatccaccagaccacggaagagtgcccgcttacaggctctccttttgcacggtctagagcgtcaacgattgcgcgcgcctgaccggccagagcgtcccgaccatggagcactttttgccgctgcgcaacatctggaaccgcgtccgcgactttccgcgcgcctccaccaccgccgccggcatcacctggatgtccaggtacatctacggatatggcaaacagctattatgggtattatgggtgcggccgcggatcccgggcccgtcgactgcagaggcctgcatgcaagcttggtgtaatcatggtcatagctgtttcctgtgtgaaattgttatccgctcacaattccacacaacatacgagccggaagcataaagtgtaaagcctggggtgcctaatgagtgagctaactcacattaattgcgttgcgctcactgcccgctttccagtcgggaaacctgtcgtgccagctgcattaatgaatcggccaacgcgcggggagaggcggtttgcgtattgggcgctcttccgcttcctcgctcactgactcgctgcgctcggtcgttcggctgcggcgagcggtatcagctcactcaaaggcggtaatacggttatccacagaatcaggggataacgcaggaaagaacatgtgagcaaaaggccagcaaaaggccaggaaccgtaaaaaggccgcgttgctggcgtttttccataggctccgcccccctgacgagcatcacaaaaatcgacgctcaagtcagaggtggcgaaacccgacaggactataaagataccaggcgtttccccctggaagctccctcgtgcgctctcctgttccgaccctgccgcttaccggatacctgtccgcctttctcccttcgggaagcgtggcgctttctcatagctcacgctgtaggtatctcagttcggtgtaggtcgttcgctccaagctgggctgtgtgcacgaaccccccgttcagcccgaccgctgcgccttatccggtaactatcgtcttgagtccaacccggtaagacacgacttatcgccactggcagcagccactggtaacaggattagcagagcgaggtatgtaggcggtgctacagagttcttgaagtggtggcctaactacggctacactagaagaacagtatttggtatctgcgctctgctgaagccagttaccttcggaaaaagagttggtagctcttgatccggcaaacaaaccaccgctggtagcggtggtttttttgtttgcaagcagcagattacgcgcagaaaaaaaggatctcaagaagatcctttgatcttttctacggggtctgacgctcagtggaacgaaaactcacgttaagggattttggtcatgagattatcaaaaaggatcttcacctagaaggtcctgtattagaggtcacgtgagtgttttgcgacattttgcgacaccatgtggtcacgctgggtatttaagcccgagtgagcacgcagggtctccattttgaagcgggaggtttgaacgcgcagccgccatccttttaaattaaaaatgaagttttaaatcaagcccaatctgaataatgttacaaccaattaaccaattctgattagaaaaactcatcgagcatcaaatgaaactgcaatttattcatatcaggattatcaataccatatttttgaaaaagccgtttctgtaatgaaggagaaaactcaccgaggcagttccataggatggcaagatcctggtatcggtctgcgattccgactcgtccaacatcaatacaacctattaatttcccctcgtcaaaaataaggttatcaagtgagaaatcaccatgagtgacgactgaatccggtgagaatggcaaaagtttatgcatttctttccagacttgttcaacaggccagccattacgctcgtcatcaaaatcactcgcatcaaccaaaccgttattcattcgtgattgcgcctgagcgagacgaaatacgcgatcgctgttaaaaggacaattacaaacaggaatcgaatgcaaccggcgcaggaacactgccagcgcatcaacaatattttcacctgaatcaggatattcttctaatacctggaatgctgtttttccggggatcgcagtggtgagtaaccatgcatcatcaggagtacggataaaatgcttgatggtcggaagaggcataaattccgtcagccagtttagtctgaccatctcatctgtaacatcattggcaacgctacctttgccatgtttcagaaacaactctggcgcatcgggcttcccatacaagcgatagattgtcgcacctgattgcccgacattatcgcgagcccatttatacccatataaatcagcatccatgttggaatttaatcgcggcctcgacgtttcccgttgaatatggctcataacaccccttgtattactgtttatgtaagcagacagttttattgttcatgatgatatatttttatcttgtgcaatgtaacatcagagattttgagacacgggccagagctgca

SEQ ID NO: 210 - DNA, 5505 bp, synthetic construct; identical to SEQ ID NO: 106
  source 1..5505: mol_type = other DNA

SEQ ID NO: 211 - DNA, 2217 bp, synthetic construct
  source 1..2217: mol_type = other DNA
atggctgccgatggttatcttccagattggctcgaggacaacctctctgagggcattcgcgagtggtgggcgctgaaacctggagccccgaagcccaaagccaaccagcaaaagcaggacgacggccggggtctggtgcttcctggctacaagtacctcggacccttcaacggactcgacaagggggagcccgtcaacgcggcggacgcagcggccctcgagcacgacaaggcctacgaccagcagctgcaggcgggtgacaatccgtacctgcggtataaccacgccgacgccgagtttcaggagcgtctgcaagaagatacgtcttttgggggcaacctcgggcgagcagtcttccaggccaagaagcgggttctagaacctctcggtctggttgaggaaggcgctaagacggctcctggaaagaagagaccggtagagccatcaccccagcgttctccagactcctctacgggcatcggcaagaaaggccaacagcccgccagaaaaagactcaattttggtcagactggcgactcagagtcagttccagaccctcaacctctcggagaacctccagcagcgccctctggtgtgggacctaatacaatggctgcaggcggtggcgcaccaatggcagacaataacgaaggcgccgacggagtgggtagttcctcgggaaattggcattgcgattccacatggctgggcgacagagtcatcaccaccagcacccgaacctgggccctgcccacctacaacaaccacctctacaagcaaatctccaacgggacatcgggaggagccaccaacgacaacacctacttcggctacagcaccccctgggggtattttgactttaacagattccactgccacttttcaccacgtgactggcagcgactcatcaacaacaactggggattccggcccaagagactcagcttcaagctcttcaacatccaggtcaaggaggtcacgcagaatgaaggcaccaagaccatcgccaataacctcaccagcaccatccaggtgtttacggactcggagtaccagctgccgtacgttctcggctctgcccaccagggctgcctgcctccgttcccggcggacgtgttcatgattccccagtacggctacctaacactcaacaacggtagtcaggccgtgggacgctcctccttctactgcctggaatactttccttcgcagatgctgagaaccggcaacaacttccagtttacttacaccttcgaggacgtgcctttccacagcagctacgcccacagccagagcttggaccggctgatgaatcctctgattgaccagtacctgtactacttgtctcggactcaaacaacaggaggcacggcaaatacgcagactctgggcttcagccaaggtgggcctaatacaatggccaatcaggcaaagaactggctgccaggaccctgttaccgccaacaacgcgtctcaacgacaaccgggcaaaacaacaatagcaactttgcctggactgctgggaccaaataccatctgaatggaagaaattcattggctaatcctggcatcgctatggcaacacacaaagacgacgaggagcgtttttttcccagtaacgggatcctgatttttggcaaacaaaatgctgccagagacaatgcggattacagcgatgtcatgctcaccagcgaggaagaaatcaaaaccactaaccctgtggctacagaggaatacggtatcgtggcagataacttgcagcagcaaaacacggctcctcaaattggaactgtcaacagccagggggccttacccggtatggtctggcagaaccgggacgtgtacctgcagggtcccatctgggccaagattcctcacacggacggcaacttccacccgtctccgctgatgggcggctttggcctgaaacatcctccgcctcagatcctgatcaagaacacgcctgtacctgcggatcctccgaccaccttcaaccagtcaaagctgaactctttcatcacgcaatacagcaccggacaggtcagcgtggaaattgaatgggagctgcagaaggaaaacagcaagcgctggaaccccgagatccagtacacctccaactactacaaatctacaagtgtggactttgctgttaatacagaaggcgtgtactctgaaccccgccccattggcacccgttacctcacccgtaatctgtaa

SEQ ID NO: 212 - DNA, 4099 bp, synthetic construct
  source 1..4099: mol_type = other DNA
atgccggggttttacgagattgtgattaaggtccccagcgaccttgacgagcatctgcccggcatttctgacagctttgtgaactgggtggccgagaaggaatgggagttgccgccagattctgacatggatctgaatctgattgagcaggcacccctgaccgtggccgagaagctgcagcgcgactttctgacggaatggcgccgtgtgagtaaggccccggaggctcttttctttgtgcaatttgagaagggagagagctacttccacatgcacgtgctcgtggaaaccaccggggtgaaatccatggttttgggacgtttcctgagtcagattcgcgaaaaactgattcagagaatttaccgcgggatcgagccgactttgccaaactggttcgcggtcacaaagaccagaaatggcgccggaggcgggaacaaggtggtggatgagtgctacatccccaattacttgctccccaaaacccagcctgagctccagtgggcgtggactaatatggaacagtatttaagcgcctgtttgaatctcacggagcgtaaacggttggtggcgcagcatctgacgcacgtgtcgcagacgcaggagcagaacaaagagaatcagaatcccaattctgatgcgccggtgatcagatcaaaaacttcagccaggtacatggagctggtcgggtggctcgtggacaaggggattacctcggagaagcagtggatccaggaggaccaggcctcatacatctccttcaatgcggcctccaactcgcggtcccaaatcaaggctgccttggacaatgcgggaaagattatgagcctgactaaaaccgcccccgactacctggtgggccagcagcccgtggaggacatttccagcaatcggatttataaaattttggaactaaacgggtacgatccccaatatgcggcttccgtctttctgggatgggccacgaaaaagttcggcaagaggaacaccatctggctgtttgggcctgcaactaccgggaagaccaacatcgcggaggccatagcccacactgtgcccttctacgggtgcgtaaactggaccaatgagaactttcccttcaacgactgtgtcgacaagatggtgatctggtgggaggaggggaagatgaccgccaaggtcgtggagtcggccaaagccattctcggaggaagcaaggtgcgcgtggaccagaaatgcaagtcctcggcccagatagacccgactcccgtgatcgtcacctccaacaccaacatgtgcgccgtgattgacgggaactcaacgaccttcgaacaccagcagccgttgcaagaccggatgttcaaatttgaactcacccgccgtctggatcatgactttgggaaggtcaccaagcaggaagtcaaagactttttccggtgggcaaaggatcacgtggttgaggtggagcatgaattctacgtcaaaaagggtggagccaagaaaagacccgcccccagtgacgcagatataagtgagcccaaacgggtgcgcgagtcagttgcgcagccatcgacgtcagacgcggaagcttcgatcaactacgcagacaggtaccaaaacaaatgttctcgtcacgtgggcatgaatctgatgctgtttccctgcagacaatgcgagagaatgaatcagaattcaaatatctgcttcactcacggacagaaagactgtttagagtgctttcccgtgtcagaatctcaacccgtttctgtcgtcaaaaaggcgtatcagaaactgtgctacattcatcatatcatgggaaaggtgccagacgcttgcactgcctgcgatctggtcaatgtggatttggatgactgcatctttgaacaataaatgatttaaatcaggtatggctgccgatggttatcttccagattggctcgaggacaacctctctgagggcattcgcgagtggtgggcgctgaaacctggagccccgaagcccaaagccaaccagcaaaagcaggacgacggccggggtctggtgcttcctggctacaagtacctcggacccttcaacggactcgacaagggggagcccgtcaacgcggcggacgcagcggccctcgagcacgacaaggcctacgaccagcagctgcaggcgggtgacaatccgtacctgcggtataaccacgccgacgccgagtttcaggagcgtctgcaagaagatacgtcttttgggggcaacctcgggcgagcagtcttccaggccaagaagcgggttctagaacctctcggtctggttgaggaaggcgctaagacggctcctggaaagaagagaccggtagagccatcaccccagcgttctccagactcctctacgggcatcggcaagaaaggccaacagcccgccagaaaaagactcaattttggtcagactggcgactcagagtcagttccagaccctcaacctctcggagaacctccagcagcgccctctggtgtgggacctaatacaatggctgcaggcggtggcgcaccaatggcagacaataacgaaggcgccgacggagtgggtagttcctcgggaaattggcattgcgattccacatggctgggcgacagagtcatcaccaccagcacccgaacctgggccctgcccacctacaacaaccacctctacaagcaaatctccaacgggacatcgggaggagccaccaacgacaacacctacttcggctacagcaccccctgggggtattttgactttaacagattccactgccacttttcaccacgtgactggcagcgactcatcaacaacaactggggattccggcccaagagactcagcttcaagctcttcaacatccaggtcaaggaggtcacgcagaatgaaggcaccaagaccatcgccaataacctcaccagcaccatccaggtgtttacggactcggagtaccagctgccgtacgttctcggctctgcccaccagggctgcctgcctccgttcccggcggacgtgttcatgattccccagtacggctacctaacactcaacaacggtagtcaggccgtgggacgctcctccttctactgcctggaatactttccttcgcagatgctgagaaccggcaacaacttccagtttacttacaccttcgaggacgtgcctttccacagcagctacgcccacagccagagcttggaccggctgatgaatcctctgattgaccagtacctgtactacttgtctcggactcaaacaacaggaggcacggcaaatacgcagactctgggcttcagccaaggtgggcctaatacaatggccaatcaggcaaagaactggctgccaggaccctgttaccgccaacaacgcgtctcaacgacaaccgggcaaaacaacaatagcaactttgcctggactgctgggaccaaataccatctgaatggaagaaattcattggctaatcctggcatcgctatggcaacacacaaagacgacgaggagcgtttttttcccagtaacgggatcctgatttttggcaaacaaaatgctgccagagacaatgcggattacagcgatgtcatgctcaccagcgaggaagaaatcaaaaccactaaccctgtggctacagaggaatacggtatcgtggcagataacttgcagcagcaaaacacggctcctcaaattggaactgtcaacagccagggggccttacccggtatggtctggcagaaccgggacgtgtacctgcagggtcccatctgggccaagattcctcacacggacggcaacttccacccgtctccgctgatgggcggctttggcctgaaacatcctccgcctcagatcctgatcaagaacacgcctgtacctgcggatcctccgaccaccttcaaccagtcaaagctgaactctttcatcacgcaatacagcaccggacaggtcagcgtggaaattgaatgggagctgcagaaggaaaacagcaagcgctggaaccccgagatccagtacacctccaactactacaaatctacaagtgtggactttgctgttaatacagaaggcgtgtactctgaaccccgccccattggcacccgttacctcacccgtaatctgtaa

SEQ ID NO: 213 - DNA, 9825 bp, synthetic construct
  source 1..9825: mol_type = other DNA
atgccggggttttacgagattgtgattaaggtccccagcgaccttgacgagcatctgcccggcatttctgacagctttgtgaactgggtggccgagaaggaatgggagttgccgccagattctgacatggatctgaatctgattgagcaggcacccctgaccgtggccgagaagctgcagcgcgactttctgacggaatggcgccgtgtgagtaaggccccggaggctcttttctttgtgcaatttgagaagggagagagctacttccacatgcacgtgctcgtggaaaccaccggggtgaaatccatggttttgggacgtttcctgagtcagattcgcgaaaaactgattcagagaatttaccgcgggatcgagccgactttgccaaactggttcgcggtcacaaagaccagaaatggcgccggaggcgggaacaaggtggtggatgagtgctacatccccaattacttgctccccaaaacccagcctgagctccagtgggcgtggactaatatggaacagtatttaagcgcctgtttgaatctcacggagcgtaaacggttggtggcgcagcatctgacgcacgtgtcgcagacgcaggagcagaacaaagagaatcagaatcccaattctgatgcgccggtgatcagatcaaaaacttcagccaggtacatggagctggtcgggtggctcgtggacaaggggattacctcggagaagcagtggatccaggaggaccaggcctcatacatctccttcaatgcggcctccaactcgcggtcccaaatcaaggctgccttggacaatgcgggaaagattatgagcctgactaaaaccgcccccgactacctggtgggccagcagcccgtggaggacatttccagcaatcggatttataaaattttggaactaaacgggtacgatccccaatatgcggcttccgtctttctgggatgggccacgaaaaagttcggcaagaggaacaccatctggctgtttgggcctgcaactaccgggaagaccaacatcgcggaggccatagcccacactgtgcccttctacgggtgcgtaaactggaccaatgagaactttcccttcaacgactgtgtcgacaagatggtgatctggtgggaggaggggaagatgaccgccaaggtcgtggagtcggccaaagccattctcggaggaagcaaggtgcgcgtggaccagaaatgcaagtcctcggcccagatagacccgactcccgtgatcgtcacctccaacaccaacatgtgcgccgtgattgacgggaactcaacgaccttcgaacaccagcagccgttgcaagaccggatgttcaaatttgaactcacccgccgtctggatcatgactttgggaaggtcaccaagcaggaagtcaaagactttttccggtgggcaaaggatcacgtggttgaggtggagcatgaattctacgtcaaaaagggtggagccaagaaaagacccgcccccagtgacgcagatataagtgagcccaaacgggtgcgcgagtcagttgcgcagccatcgacgtcagacgcggaagcttcgatcaactacgcagacaggtaccaaaacaaatgttctcgtcacgtgggcatgaatctgatgctgtttccctgcagacaatgcgagagaatgaatcagaattcaaatatctgcttcactcacggacagaaagactgtttagagtgctttcccgtgtcagaatctcaacccgtttctgtcgtcaaaaaggcgtatcagaaactgtgctacattcatcatatcatgggaaaggtgccagacgcttgcactgcctgcgatctggtcaatgtggatttggatgactgcatctttgaacaataaatgatttaaatcaggtatggctgccgatggttatcttccagattggctcgaggacaacctctctgagggcattcgcgagtggtgggcgctgaaacctggagccccgaagcccaaagccaaccagcaaaagcaggacgacggccggggtctggtgcttcctggctacaagtacctcggacccttcaacggactcgacaagggggagcccgtcaacgcggcggacgcagcggccctcgagcacgacaaggcctacgaccagcagctgcaggcgggtgacaatccgtacctgcggtataaccacgccgacgccgagtttcaggagcgtctgcaagaagatacgtcttttgggggcaacctcgggcgagcagtcttccaggccaagaagcgggttctagaacctctcggtctggttgaggaaggcgctaagacggctcctggaaagaagagaccggtagagccatcaccccagcgttctccagactcctctacgggcatcggcaagaaaggccaacagcccgccagaaaaagactcaattttggtcagactggcgactcagagtcagttccagaccctcaacctctcggagaacctccagcagcgccctctggtgtgggacctaatacaatggctgcaggcggtggcgcaccaatggcagacaataacgaaggcgccgacggagtgggtagttcctcgggaaattggcattgcgattccacatggctgggcgacagagtcatcaccaccagcacccgaacctgggccctgcccacctacaacaaccacctctacaagcaaatctccaacgggacatcgggaggagccaccaacgacaacacctacttcggctacagcaccccctgggggtattttgactttaacagattccactgccacttttcaccacgtgactggcagcgactcatcaacaacaactggggattccggcccaagagactcagcttcaagctcttcaacatccaggtcaaggaggtcacgcagaatgaaggcaccaagaccatcgccaataacctcaccagcaccatccaggtgtttacggactcggagtaccagctgccgtacgttctcggctctgcccaccagggctgcctgcctccgttcccggcggacgtgttcatgattccccagtacggctacctaacactcaacaacggtagtcaggccgtgggacgctcctccttctactgcctggaatactttccttcgcagatgctgagaaccggcaacaacttccagtttacttacaccttcgaggacgtgcctttccacagcagctacgcccacagccagagcttggaccggctgatgaatcctctgattgaccagtacctgtactacttgtctcggactcaaacaacaggaggcacggcaaatacgcagactctgggcttcagccaaggtgggcctaatacaatggccaatcaggcaaagaactggctgccaggaccctgttaccgccaacaacgcgtctcaacgacaaccgggcaaaacaacaatagcaactttgcctggactgctgggaccaaataccatctgaatggaagaaattcattggctaatcctggcatcgctatggcaacacacaaagacgacgaggagcgtttttttcccagtaacgggatcctgatttttggcaaacaaaatgctgccagagacaatgcggattacagcgatgtcatgctcaccagcgaggaagaaatcaaaaccactaaccctgtggctacagaggaatacggtatcgtggcagataacttgcagcagcaaaacacggctcctcaaattggaactgtcaacagccagggggccttacccggtatggtctggcagaaccgggacgtgtacctgcagggtcccatctgggccaagattcctcacacggacggcaacttccacccgtctccgctgatgggcggctttggcctgaaacatcctccgcctcagatcctgatcaagaacacgcctgtacctgcggatcctccgaccaccttcaaccagtcaaagctgaactctttcatcacgcaatacagcaccggacaggtcagcgtggaaattgaatgggagctgcagaaggaaaacagcaagcgctggaaccccgagatccagtacacctccaactactacaaatctacaagtgtggactttgctgttaatacagaaggcgtgtactctgaaccccgccccattggcacccgttacctcacccgtaatctgtaattgcctgttaatcaataaaccggttgattcgtttcagttgaactttggtctctgcgaagggcgaattcgtttaaacctgcaggactagagccgaattctgcatcgcgatagggataacagggtaataaataatgtactagagacactttcaataaaggcaaatgcttttatttgtacactctcgggtgattatttacccccacccttgccgtctgcgccgttcagaagtcgaaggggttctgtctggcatcggaatgggccacgggcagagacacgttccggtactggtgcttggtggaccacttgaactcaggcacgaccattctaggcagctctgtgaagttctcgctccacaggctccgcaccatcaccagggcgttcagcaggtcaggggcgctgattttgaagtcgcagttaggtccgccgccctgggctctgctgtttctgtacacagggttgcagcactggaacacaataagagcagggtggtgcacgctggccagcacagacttgtcgctgatcaggtcggcgtcgagatcctcggcgttagacaaggcaaaaggggtcagcttgggcagctggcggcccaggaaaggggcgtggccgggcttgctattgcactcgcatctcagaggcatcagcaggtggccgtggccggtctgggcgttggggtacagggcctgcataaaggccttgatctgtttgaaggccacttgggccttggcgccttcggagaagaacatgccgcagcttttgccgctgaactggttggcggggcaggcggcgtcgtgcacacaacaccgggcgtcggtattgctgatctgcaccacgtttctgccccatctgttcttcacgatcttggccttgctgctctgctctttcagggccctctggccgttctcagaggtgacgtccatctcgatcacatgttccttgttgatcatgatgctgccgtgcagacacttcagctcgccctcgatttccgcgcatctgtgcagccacagggcacaaccggtaggctcgtggtgcttgtatgtcacctcagcaaaagattgcaggtaggcttgcaggaatctgcccatcatggtcacgaaggtcttgttggaggtaaaagtcagctgcagtcctctgtgttcctcgttcagccatgtcttgcacacggcggccagagcctcgacctgatctggcagcagcttgaaattagccttcaggtcgttgtccacgtgatacttatccatcagtgctctggcggcttccatgcccttctcccaggcggaaacgatgggcacgctcagggggttcatcacggtgatctcgctttcagcttctgaaggttcctcctcttcctcctgtgttctcatgccccgagccacggggtcgtcctcattcagtctccgcacggttctttttcctccctttccgtgcttaatcagtacaggaggattagagaagcccaccatctggagggcgacgtcctccctttcttcttcgctatccacgatcacttctgggctggggggccgttcaggctttgggctaggccgtttttttttcttcttaggggcgatagccagatcagcggcgcttgtagagggccgaggactaggggttctaggcacgagggcgtcctggctgctgtcctcctcatcctcgctctcgatccgtctccgcattctcttcttagggggggcccgcggagggggagggctagggctaggggacgacacatcttccatggttggaggtctgcgagcagcgcctctgcctctctctggtgttgtctcgcgctgttcttcctctctagaggccatttccttctcctataggcagaaaaagatcgttgaaactcactccggggctgtggacgtcggcttaccttcgcaaatttgtacctgaggactaccacgcccacgagattaggttctacgaagaccaatcccgcccgcctaatgcggagcttaccgcctgcgtcattacccagggccacattcttggccaattgcaagccatcaacaaagcccgccaagagtttctgctacgaaagggacggggggtttacttggacccccagtccggcgaggagctcaacccaatccccccgccgccgcagccctatcagcagcagccgcgggcccttgcttcccaggatggcacccaaaaagaagctgcagctgccgccgccacccacggacgaggaggaatactgggacagtcaggcagaggaggttttggacgaggaggaggaggacatgatggaagactgggagagcctagacgaggaagcttccgaggtcgaagaggtgtcagacgaaacaccgtcaccctcggtcgcattcccctcgccggcgccccagaaatcggcaaccggttccagcatggctacaacctccgctcctcaggcgccgccggcactgcccgttcgccgacccaaccgtagatgggacaccactggaaccagggccggtaagtccaagcagccgccgccgttagcccaagagcaacaacagcgccaaggctaccgctcatggcgcgggcacaagaacgccatagttgcttgcttgcaagactgtgggggcaacatctccttcgcccgccgctttcttctctaccatcacggcgtggccttcccccgtaacatcctgcattactaccgtcatctctacagcccatactgcaccggcggcagcggcagcaacagcagcggccacacagaagcaaaggcgaccggatagcaagactctgacaaagcccaagaaatccacagcggcggcagcagcaggaggaggagcgctgcgtctggcgcccaacgaacccgtatcgacccgcgagcttagaaacaggatttttcccactctgtatgctatatttcaacagagcaggggccaagaacaagagctgaaaataaaaaacaggtctctgcgatccctcacccgcagctgcctgtatcacaaaagcgaagatcagcttcggcgcacgctggaagacgcggaggctctcttcagtaaatactgcgcgctgactcttaaggactagtttcgcgccctttctcaaatttaagcgcgaaaactacgtcatctccagcggccacacccggcgccagcacctgttgtcagcgccattttttagggcggagtaacttgtatgtgttgggaattgtagttttcttaaaatgggaagtgacgtaacgtgggaaaacggaagtgacgatttgaggaagttgtgggttttttggctttcgtttctgggcgtaggttcgcgtgcggttttctgggtgttttttgtggactttaaccgttacgtcattttttagtcctatatatactcgctctgcacttggcccttttttacactgtgactgattgagctggtgccgtgtcgagtggtgtttttttaataggttttcttttttactggtaaggctgactgttatgactacgtccggcgttccatttggcatgacactacgaccaacacgatctcggttgtctcggcgcactccgtacagtagggatcgtctacctccttttgagacagaaacccgcgctaccatactggaggatcatccgctgctgcccgaatgtaacactttgacaatgcacaacgtgagttacgtgcgaggtcttccctgcagtgtgggatttacgctgattcaggaatgggttgttccctgggatatggttctaacgcgggaggagcttgtaatcctgaggaagtgtatgcacgtgtgcctgtgttgtgccaacattgatatcatgacgagcatgatgatccatggttacgagtcctgggctctccactgtcattgttccagtcccggttccctgcagtgtatagccggcgggcaggttttggccagctggtttaggatggtggtggatggcgccatgtttaatcagaggtttatatggtaccgggaggtggtgaattacaacatgccaaaagaggtaatgtttatgtccagcgtgtttatgaggggtcgccacttaatctacctgcgcttgtggtatgatggccacgtgggttctgtggtccccgccatgagctttggatacagcgccttgcactgtgggattttgaacaatattgtggtgctgtgctgcagttactgtgctgatttaagtgagatcagggtgcgctgctgtgcccggaggacaaggcgccttatgctgcgggcggtgcgaatcatcgctgaggagaccactgccatgttgtattcctgcaggacggagcggcggcggcagcagtttattcgcgcgctgctgcagcaccaccgccctatcctgatgcacgattatgactctacccccatgtaggcgtggacttctccttcgccgcccgttaagcaaccgcaagttggacagcagcctgtggctcagcagctggacagcgacatgaacttaagtgagctgcccggggagtttattaatatcactgatgagcgtttggctcgacaggaaaccgtgtggaatataacacctaagaatatgtctgttacccatgatatgatgctttttaaggccagccggggagaaaggactgtgtactctgtgtgttgggagggaggtggcaggttgaatactagggttctgtgagtttgattaaggtacggtgatctgtataagctatgtggtggtggggctatactactgaatgaaaaatgacttgaaattttctgcaattgaaaaataaacacgttgaaacataacacaaacgattctttattcttgggcaatgtatgaaaaagtgtaagaggatgtggcaaatatttcattaatgtagttgtggccagaccagtcccatgaaaatgacatagagtatgcacttggagttgtgtctcctgtttcctgtgtaccgtttagtgtaatggttagtgttacaggtttagttttgtctccgtttaagtaaacttgactgacaatgttacttttggcagttttaccgtgagattttggataagctgataggttaggcataaatccaacagcgtttgtataggctgtcgcccctcctgacgcggtaggaggaggggagggtgccctgcatgtctgccgctgctcttgctcttgccgctgctgaggaggggggcgcatctgccgcagcaccggatgcatctgggaaaagcaaaaaaggggctcgtccctgtttccggaggaatttgcaagcggggtcttgcatgacggggaggcaaacccccgttcgccgcagtccggccggtccgagactcgaaccgggggtcccgcgactcaacccttggaaaataaccctccggctacagggagcgagccacttaatgctttcgctttccagcctaaccgcttacgctgcgcgcggccagtggccaaaaaagctagcgcagcagccgccgcgcctggaaggaagccaaaaggagcactcccccgttgtctgacgtcgcacacctgggttcgacacgcgggcggtaaccgcatggatcacggcggacggccggatacggggctcgaaccccggtcgtccgccatgatacccttgcgaatttatccaccagaccacggaagagtgcccgcttacaggctctccttttgcacggtctagagcgtcaacgattgcgcgcgcctgaccggccagagcgtcccgaccatggagcactttttgccgctgcgcaacatctggaaccgcgtccgcgactttccgcgcgcctccaccaccgccgccggcatcacctggatgtccaggtacatctacggata

SEQ ID NO: 214 - DNA, 12588 bp, synthetic construct
  source 1..12588: mol_type = other DNA
tcgcgcgtttcggtgatgacggtgaaaacctctgacacatgcagctcccggagacggtcacagcttgtctgtaagcggatgccgggagcagacaagcccgtcagggcgcgtcagcgggtgttggcgggtgtcggggctggcttaactatgcggcatcagagcagattgtactgagagtgcaccatatgcggtgtgaaataccgcacagatgcgtaaggagaaaataccgcatcaggcgccattcgccattcaggctgcgcaactgttgggaagggcgatcggtgcgggcctcttcgctattacgccagctggcgaaagggggatgtgctgcaaggcgattaagttgggtaacgccagggttttcccagtcacgacgttgtaaaacgacggccagagaattccgcagggtctccattttgaagcgggaggtttgaacgcgcagccgccatgccggggttttacgagattgtgattaaggtccccagcgaccttgacgagcatctgcccggcatttctgacagctttgtgaactgggtggccgagaaggaatgggagttgccgccagattctgacatggatctgaatctgattgagcaggcacccctgaccgtggccgagaagctgcagcgcgactttctgacggaatggcgccgtgtgagtaaggccccggaggctcttttctttgtgcaatttgagaagggagagagctacttccacatgcacgtgctcgtggaaaccaccggggtgaaatccatggttttgggacgtttcctgagtcagattcgcgaaaaactgattcagagaatttaccgcgggatcgagccgactttgccaaactggttcgcggtcacaaagaccagaaatggcgccggaggcgggaacaaggtggtggatgagtgctacatccccaattacttgctccccaaaacccagcctgagctccagtgggcgtggactaatatggaacagtatttaagcgcctgtttgaatctcacggagcgtaaacggttggtggcgcagcatctgacgcacgtgtcgcagacgcaggagcagaacaaagagaatcagaatcccaattctgatgcgccggtgatcagatcaaaaacttcagccaggtacatggagctggtcgggtggctcgtggacaaggggattacctcggagaagcagtggatccaggaggaccaggcctcatacatctccttcaatgcggcctccaactcgcggtcccaaatcaaggctgccttggacaatgcgggaaagattatgagcctgactaaaaccgcccccgactacctggtgggccagcagcccgtggaggacatttccagcaatcggatttataaaattttggaactaaacgggtacgatccccaatatgcggcttccgtctttctgggatgggccacgaaaaagttcggcaagaggaacaccatctggctgtttgggcctgcaactaccgggaagaccaacatcgcggaggccatagcccacactgtgcccttctacgggtgcgtaaactggaccaatgagaactttcccttcaacgactgtgtcgacaagatggtgatctggtgggaggaggggaagatgaccgccaaggtcgtggagtcggccaaagccattctcggaggaagcaaggtgcgcgtggaccagaaatgcaagtcctcggcccagatagacccgactcccgtgatcgtcacctccaacaccaacatgtgcgccgtgattgacgggaactcaacgaccttcgaacaccagcagccgttgcaagaccggatgttcaaatttgaactcacccgccgtctggatcatgactttgggaaggtcaccaagcaggaagtcaaagactttttccggtgggcaaaggatcacgtggttgaggtggagcatgaattctacgtcaaaaagggtggagccaagaaaagacccgcccccagtgacgcagatataagtgagcccaaacgggtgcgcgagtcagttgcgcagccatcgacgtcagacgcggaagcttcgatcaactacgcagacaggtaccaaaacaaatgttctcgtcacgtgggcatgaatctgatgctgtttccctgcagacaatgcgagagaatgaatcagaattcaaatatctgcttcactcacggacagaaagactgtttagagtgctttcccgtgtcagaatctcaacccgtttctgtcgtcaaaaaggcgtatcagaaactgtgctacattcatcatatcatgggaaaggtgccagacgcttgcactgcctgcgatctggtcaatgtggatttggatgactgcatctttgaacaataaatgatttaaatcaggtatggctgccgatggttatcttccagattggctcgaggacaacctctctgagggcattcgcgagtggtgggcgctgaaacctggagccccgaagcccaaagccaaccagcaaaagcaggacgacggccggggtctggtgcttcctggctacaagtacctcggacccttcaacggactcgacaagggggagcccgtcaacgcggcggacgcagcggccctcgagcacgacaaggcctacgaccagcagctgcaggcgggtgacaatccgtacctgcggtataaccacgccgacgccgagtttcaggagcgtctgcaagaagatacgtcttttgggggcaacctcgggcgagcagtcttccaggccaagaagcgggttctagaacctctcggtctggttgaggaaggcgctaagacggctcctggaaagaagagaccggtagagccatcaccccagcgttctccagactcctctacgggcatcggcaagaaaggccaacagcccgccagaaaaagactcaattttggtcagactggcgactcagagtcagttccagaccctcaacctctcggagaacctccagcagcgccctctggtgtgggacctaatacaatggctgcaggcggtggcgcaccaatggcagacaataacgaaggcgccgacggagtgggtagttcctcgggaaattggcattgcgattccacatggctgggcgacagagtcatcaccaccagcacccgaacctgggccctgcccacctacaacaaccacctctacaagcaaatctccaacgggacatcgggaggagccaccaacgacaacacctacttcggctacagcaccccctgggggtattttgactttaacagattccactgccacttttcaccacgtgactggcagcgactcatcaacaacaactggggattccggcccaagagactcagcttcaagctcttcaacatccaggtcaaggaggtcacgcagaatgaaggcaccaagaccatcgccaataacctcaccagcaccatccaggtgtttacggactcggagtaccagctgccgtacgttctcggctctgcccaccagggctgcctgcctccgttcccggcggacgtgttcatgattccccagtacggctacctaacactcaacaacggtagtcaggccgtgggacgctcctccttctactgcctggaatactttccttcgcagatgctgagaaccggcaacaacttccagtttacttacaccttcgaggacgtgcctttccacagcagctacgcccacagccagagcttggaccggctgatgaatcctctgattgaccagtacctgtactacttgtctcggactcaaacaacaggaggcacggcaaatacgcagactctgggcttcagccaaggtgggcctaatacaatggccaatcaggcaaagaactggctgccaggaccctgttaccgccaacaacgcgtctcaacgacaaccgggcaaaacaacaatagcaactttgcctggactgctgggaccaaataccatctgaatggaagaaattcattggctaatcctggcatcgctatggcaacacacaaagacgacgaggagcgtttttttcccagtaacgggatcctgatttttggcaaacaaaatgctgccagagacaatgcggattacagcgatgtcatgctcaccagcgaggaagaaatcaaaaccactaaccctgtggctacagaggaatacggtatcgtggcagataacttgcagcagcaaaacacggctcctcaaattggaactgtcaacagccagggggccttacccggtatggtctggcagaaccgggacgtgtacctgcagggtcccatctgggccaagattcctcacacggacggcaacttccacccgtctccgctgatgggcggctttggcctgaaacatcctccgcctcagatcctgatcaagaacacgcctgtacctgcggatcctccgaccaccttcaaccagtcaaagctgaactctttcatcacgcaatacagcaccggacaggtcagcgtggaaattgaatgggagctgcagaaggaaaacagcaagcgctggaaccccgagatccagtacacctccaactactacaaatctacaagtgtggactttgctgttaatacagaaggcgtgtactctgaaccccgccccattggcacccgttacctcacccgtaatctgtaattgcctgttaatcaataaaccggttgattcgtttcagttgaactttggtctctgcgaagggcgaattcgtttaaacctgcaggactagagccgaattctgcatcgcgatagggataacagggtaataaataatgtactagagacactttcaataaaggcaaatgcttttatttgtacactctcgggtgattatttacccccacccttgccgtctgcgccgttcagaagtcgaaggggttctgtctggcatcggaatgggccacgggcagagacacgttccggtactggtgcttggtggaccacttgaactcaggcacgaccattctaggcagctctgtgaagttctcgctccacaggctccgcaccatcaccagggcgttcagcaggtcaggggcgctgattttgaagtcgcagttaggtccgccgccctgggctctgctgtttctgtacacagggttgcagcactggaacacaataagagcagggtggtgcacgctggccagcacagacttgtcgctgatcaggtcggcgtcgagatcctcggcgttagacaaggcaaaaggggtcagcttgggcagctggcggcccaggaaaggggcgtggccgggcttgctattgcactcgcatctcagaggcatcagcaggtggccgtggccggtctgggcgttggggtacagggcctgcataaaggccttgatctgtttgaaggccacttgggccttggcgccttcggagaagaacatgccgcagcttttgccgctgaactggttggcggggcaggcggcgtcgtgcacacaacaccgggcgtcggtattgctgatctgcaccacgtttctgccccatctgttcttcacgatcttggccttgctgctctgctctttcagggccctctggccgttctcagaggtgacgtccatctcgatcacatgttccttgttgatcatgatgctgccgtgcagacacttcagctcgccctcgatttccgcgcatctgtgcagccacagggcacaaccggtaggctcgtggtgcttgtatgtcacctcagcaaaagattgcaggtaggcttgcaggaatctgcccatcatggtcacgaaggtcttgttggaggtaaaagtcagctgcagtcctctgtgttcctcgttcagccatgtcttgcacacggcggccagagcctcgacctgatctggcagcagcttgaaattagccttcaggtcgttgtccacgtgatacttatccatcagtgctctggcggcttccatgcccttctcccaggcggaaacgatgggcacgctcagggggttcatcacggtgatctcgctttcagcttctgaaggttcctcctcttcctcctgtgttctcatgccccgagccacggggtcgtcctcattcagtctccgcacggttctttttcctccctttccgtgcttaatcagtacaggaggattagagaagcccaccatctggagggcgacgtcctccctttcttcttcgctatccacgatcacttctgggctggggggccgttcaggctttgggctaggccgtttttttttcttcttaggggcgatagccagatcagcggcgcttgtagagggccgaggactaggggttctaggcacgagggcgtcctggctgctgtcctcctcatcctcgctctcgatccgtctccgcattctcttcttagggggggcccgcggagggggagggctagggctaggggacgacacatcttccatggttggaggtctgcgagcagcgcctctgcctctctctggtgttgtctcgcgctgttcttcctctctagaggccatttccttctcctataggcagaaaaagatcgttgaaactcactccggggctgtggacgtcggcttaccttcgcaaatttgtacctgaggactaccacgcccacgagattaggttctacgaagaccaatcccgcccgcctaatgcggagcttaccgcctgcgtcattacccagggccacattcttggccaattgcaagccatcaacaaagcccgccaagagtttctgctacgaaagggacggggggtttacttggacccccagtccggcgaggagctcaacccaatccccccgccgccgcagccctatcagcagcagccgcgggcccttgcttcccaggatggcacccaaaaagaagctgcagctgccgccgccacccacggacgaggaggaatactgggacagtcaggcagaggaggttttggacgaggaggaggaggacatgatggaagactgggagagcctagacgaggaagcttccgaggtcgaagaggtgtcagacgaaacaccgtcaccctcggtcgcattcccctcgccggcgccccagaaatcggcaaccggttccagcatggctacaacctccgctcctcaggcgccgccggcactgcccgttcgccgacccaaccgtagatgggacaccactggaaccagggccggtaagtccaagcagccgccgccgttagcccaagagcaacaacagcgccaaggctaccgctcatggcgcgggcacaagaacgccatagttgcttgcttgcaagactgtgggggcaacatctccttcgcccgccgctttcttctctaccatcacggcgtggccttcccccgtaacatcctgcattactaccgtcatctctacagcccatactgcaccggcggcagcggcagcaacagcagcggccacacagaagcaaaggcgaccggatagcaagactctgacaaagcccaagaaatccacagcggcggcagcagcaggaggaggagcgctgcgtctggcgcccaacgaacccgtatcgacccgcgagcttagaaacaggatttttcccactctgtatgctatatttcaacagagcaggggccaagaacaagagctgaaaataaaaaacaggtctctgcgatccctcacccgcagctgcctgtatcacaaaagcgaagatcagcttcggcgcacgctggaagacgcggaggctctcttcagtaaatactgcgcgctgactcttaaggactagtttcgcgccctttctcaaatttaagcgcgaaaactacgtcatctccagcggccacacccggcgccagcacctgttgtcagcgccattttttagggcggagtaacttgtatgtgttgggaattgtagttttcttaaaatgggaagtgacgtaacgtgggaaaacggaagtgacgatttgaggaagttgtgggttttttggctttcgtttctgggcgtaggttcgcgtgcggttttctgggtgttttttgtggactttaaccgttacgtcattttttagtcctatatatactcgctctgcacttggcccttttttacactgtgactgattgagctggtgccgtgtcgagtggtgtttttttaataggttttcttttttactggtaaggctgactgttatgactacgtccggcgttccatttggcatgacactacgaccaacacgatctcggttgtctcggcgcactccgtacagtagggatcgtctacctccttttgagacagaaacccgcgctaccatactggaggatcatccgctgctgcccgaatgtaacactttgacaatgcacaacgtgagttacgtgcgaggtcttccctgcagtgtgggatttacgctgattcaggaatgggttgttccctgggatatggttctaacgcgggaggagcttgtaatcctgaggaagtgtatgcacgtgtgcctgtgttgtgccaacattgatatcatgacgagcatgatgatccatggttacgagtcctgggctctccactgtcattgttccagtcccggttccctgcagtgtatagccggcgggcaggttttggccagctggtttaggatggtggtggatggcgccatgtttaatcagaggtttatatggtaccgggaggtggtgaattacaacatgccaaaagaggtaatgtttatgtccagcgtgtttatgaggggtcgccacttaatctacctgcgcttgtggtatgatggccacgtgggttctgtggtccccgccatgagctttggatacagcgccttgcactgtgggattttgaacaatattgtggtgctgtgctgcagttactgtgctgatttaagtgagatcagggtgcgctgctgtgcccggaggacaaggcgccttatgctgcgggcggtgcgaatcatcgctgaggagaccactgccatgttgtattcctgcaggacggagcggcggcggcagcagtttattcgcgcgctgctgcagcaccaccgccctatcctgatgcacgattatgactctacccccatgtaggcgtggacttctccttcgccgcccgttaagcaaccgcaagttggacagcagcctgtggctcagcagctggacagcgacatgaacttaagtgagctgcccggggagtttattaatatcactgatgagcgtttggctcgacaggaaaccgtgtggaatataacacctaagaatatgtctgttacccatgatatgatgctttttaaggccagccggggagaaaggactgtgtactctgtgtgttgggagggaggtggcaggttgaatactagggttctgtgagtttgattaaggtacggtgatctgtataagctatgtggtggtggggctatactactgaatgaaaaatgacttgaaattttctgcaattgaaaaataaacacgttgaaacataacacaaacgattctttattcttgggcaatgtatgaaaaagtgtaagaggatgtggcaaatatttcattaatgtagttgtggccagaccagtcccatgaaaatgacatagagtatgcacttggagttgtgtctcctgtttcctgtgtaccgtttagtgtaatggttagtgttacaggtttagttttgtctccgtttaagtaaacttgactgacaatgttacttttggcagttttaccgtgagattttggataagctgataggttaggcataaatccaacagcgtttgtataggctgtcgcccctcctgacgcggtaggaggaggggagggtgccctgcatgtctgccgctgctcttgctcttgccgctgctgaggaggggggcgcatctgccgcagcaccggatgcatctgggaaaagcaaaaaaggggctcgtccctgtttccggaggaatttgcaagcggggtcttgcatgacggggaggcaaacccccgttcgccgcagtccggccggtccgagactcgaaccgggggtcccgcgactcaacccttggaaaataaccctccggctacagggagcgagccacttaatgctttcgctttccagcctaaccgcttacgctgcgcgcggccagtggccaaaaaagctagcgcagcagccgccgcgcctggaaggaagccaaaaggagcactcccccgttgtctgacgtcgcacacctgggttcgacacgcgggcggtaaccgcatggatcacggcggacggccggatacggggctcgaaccccggtcgtccgccatgatacccttgcgaatttatccaccagaccacggaagagtgcccgcttacaggctctccttttgcacggtctagagcgtcaacgattgcgcgcgcctgaccggccagagcgtcccgaccatggagcactttttgccgctgcgcaacatctggaaccgcgtccgcgactttccgcgcgcctccaccaccgccgccggcatcacctggatgtccaggtacatctacggatatggcaaacagctattatgggtattatgggtgcggccgcggatcccgggcccgtcgactgcagaggcctgcatgcaagcttggtgtaatcatggtcatagctgtttcctgtgtgaaattgttatccgctcacaattccacacaacatacgagccggaagcataaagtgtaaagcctggggtgcctaatgagtgagctaactcacattaattgcgttgcgctcactgcccgctttccagtcgggaaacctgtcgtgccagctgcattaatgaatcggccaacgcgcggggagaggcggtttgcgtattgggcgctcttccgcttcctcgctcactgactcgctgcgctcggtcgttcggctgcggcgagcggtatcagctcactcaaaggcggtaatacggttatccacagaatcaggggataacgcaggaaagaacatgtgagcaaaaggccagcaaaaggccaggaaccgtaaaaaggccgcgttgctggcgtttttccataggctccgcccccctgacgagcatcacaaaaatcgacgctcaagtcagaggtggcgaaacccgacaggactataaagataccaggcgtttccccctggaagctccctcgtgcgctctcctgttccgaccctgccgcttaccggatacctgtccgcctttctcccttcgggaagcgtggcgctttctcatagctcacgctgtaggtatctcagttcggtgtaggtcgttcgctccaagctgggctgtgtgcacgaaccccccgttcagcccgaccgctgcgccttatccggtaactatcgtcttgagtccaacccggtaagacacgacttatcgccactggcagcagccactggtaacaggattagcagagcgaggtatgtaggcggtgctacagagttcttgaagtggtggcctaactacggctacactagaagaacagtatttggtatctgcgctctgctgaagccagttaccttcggaaaaagagttggtagctcttgatccggcaaacaaaccaccgctggtagcggtggtttttttgtttgcaagcagcagattacgcgcagaaaaaaaggatctcaagaagatcctttgatcttttctacggggtctgacgctcagtggaacgaaaactcacgttaagggattttggtcatgagattatcaaaaaggatcttcacctagaaggtcctgtattagaggtcacgtgagtgttttgcgacattttgcgacaccatgtggtcacgctgggtatttaagcccgagtgagcacgcagggtctccattttgaagcgggaggtttgaacgcgcagccgccatccttttaaattaaaaatgaagttttaaatcaagcccaatctgaataatgttacaaccaattaaccaattctgattagaaaaactcatcgagcatcaaatgaaactgcaatttattcatatcaggattatcaataccatatttttgaaaaagccgtttctgtaatgaaggagaaaactcaccgaggcagttccataggatggcaagatcctggtatcggtctgcgattccgactcgtccaacatcaatacaacctattaatttcccctcgtcaaaaataaggttatcaagtgagaaatcaccatgagtgacgactgaatccggtgagaatggcaaaagtttatgcatttctttccagacttgttcaacaggccagccattacgctcgtcatcaaaatcactcgcatcaaccaaaccgttattcattcgtgattgcgcctgagcgagacgaaatacgcgatcgctgttaaaaggacaattacaaacaggaatcgaatgcaaccggcgcaggaacactgccagcgcatcaacaatattttcacctgaatcaggatattcttctaatacctggaatgctgtttttccggggatcgcagtggtgagtaaccatgcatcatcaggagtacggataaaatgcttgatggtcggaagaggcataaattccgtcagccagtttagtctgaccatctcatctgtaacatcattggcaacgctacctttgccatgtttcagaaacaactctggcgcatcgggcttcccatacaagcgatagattgtcgcacctgattgcccgacattatcgcgagcccatttatacccatataaatcagcatccatgttggaatttaatcgcggcctcgacgtttcccgttgaatatggctcataacaccccttgtattactgtttatgtaagcagacagttttattgttcatgatgatatatttttatcttgtgcaatgtaacatcagagattttgagacacgggccagagctgca

SEQ ID NO: 215 - DNA, 5505 bp, synthetic construct; identical to SEQ ID NO: 106
  source 1..5505: mol_type = other DNA

SEQ ID NO: 216 - DNA, 2217 bp, synthetic construct
  source 1..2217: mol_type = other DNA
atggctgccgatggttatcttccagattggctcgaggacaacctctctgagggcattcgcgagtggtgggcgctgaaacctggagccccgaagcccaaagccaaccagcaaaagcaggacgacggccggggtctggtgcttcctggctacaagtacctcggacccttcaacggactcgacaagggggagcccgtcaacgcggcggacgcagcggccctcgagcacgacaaggcctacgaccagcagctgcaggcgggtgacaatccgtacctgcggtataaccacgccgacgccgagtttcaggagcgtctgcaagaagatacgtcttttgggggcaacctcgggcgagcagtcttccaggccaagaagcgggttctcgaacctctcggtctggtagaggaaggcgctaagacggctcctggaaagaagagaccggtagagccatcaccccagcgttctccagactcctctacgggcatcggcaagaaaggccaacagcccgccagaaaaagactcaattttggtcagactggcgactcagagtcagttccagaccctcaacctctcggagaacctccagcagcgccctctggtgtgggacctaatacaatggctgcaggcggtggcgcaccaatggcagacaataacgaaggcgccgacggagtgggtagttcctcgggaaattggcattgcgattccacatggctgggcgacagagtcatcaccaccagcacccgaacctgggccctgcccacctacaacaaccacctctacaagcaaatctccaacgggacatcgggaggagccaccaacgacaacacctacttcggctacagcaccccctgggggtattttgactttaacagattccactgccacttttcaccacgtgactggcagcgactcatcaacaacaactggggattccggcccaagagactcagcttcaagctcttcaacatccaggtcaaggaggtcacgcagaatgaaggcaccaagaccatcgccaataacctcaccagcaccatccaggtgtttacggactcggagtaccagctgccgtacgttctcggctctgcccaccagggctgcctgcctccgttcccggcggacgtgttcatgattccccagtacggctacctaacactcaacaacggtagtcaggccgtgggacgctcctccttctactgcctggaatactttccttcgcagatgctgagaaccggcaacaacttccagtttacttacaccttcgaggacgtgcctttccacagcagctacgcccacagccagagcttggaccggctgatgaatcctctgattgaccagtacctgtactacttgtctcggactcaaacaacaggaggcacggcaaatacgcagactctgggcttcagccaaggtgggcctaatacaatggccaatcaggcaaagaactggctgccaggaccctgttaccgccaacaacgcgtctcaacgacaaccgggcaaaacaacaatagcaactttgcctggactgctgggaccaaataccatctgaatggaagaaattcattggctaatcctggcatcgctatggcaacacacaaagacgacgaggagcgtttttttcccagtaacgggatcctgatttttggcaaacaaaatgctgccagagacaatgcggattacagcgatgtcatgctcaccagcgaggaagaaatcaaaaccactaaccctgtggctacagaggaatacggtatcgtggcagataacttgcagcagcaaaacacggctcctcaaattggaactgtcaacagccagggggccttacccggtatggtctggcagaaccgggacgtgtacctgcagggtcccatctgggccaagattcctcacacggacggcaacttccacccgtctccgctgatgggcggctttggcctgaaacatcctccgcctcagatcctgatcaagaacacgcctgtacctgcggatcctccgaccaccttcaaccagtcaaagctgaactctttcatcacgcaatacagcaccggacaggtcagcgtggaaattgaatgggagctgcagaaggaaaacagcaagcgctggaaccccgagatccagtacacctccaactactacaaatctacaagtgtggactttgctgttaatacagaaggcgtgtactctgaaccccgccccattggcacccgttacctcacccgtaatctgtaa

SEQ ID NO: 217 - DNA, 4099 bp, synthetic construct
  source 1..4099: mol_type = other DNA
atgccggggttttacgagattgtgattaaggtccccagcgaccttgacgagcatctgcccggcatttctgacagctttgtgaactgggtggccgagaaggaatgggagttgccgccagattctgacatggatctgaatctgattgagcaggcacccctgaccgtggccgagaagctgcagcgcgactttctgacggaatggcgccgtgtgagtaaggccccggaggctcttttctttgtgcaatttgagaagggagagagctacttccacatgcacgtgctcgtggaaaccaccggggtgaaatccatggttttgggacgtttcctgagtcagattcgcgaaaaactgattcagagaatttaccgcgggatcgagccgactttgccaaactggttcgcggtcacaaagaccagaaatggcgccggaggcgggaacaaggtggtggatgagtgctacatccccaattacttgctccccaaaacccagcctgagctccagtgggcgtggactaatatggaacagtatttaagcgcctgtttgaatctcacggagcgtaaacggttggtggcgcagcatctgacgcacgtgtcgcagacgcaggagcagaacaaagagaatcagaatcccaattctgatgcgccggtgatcagatcaaaaacttcagccaggtacatggagctggtcgggtggctcgtggacaaggggattacctcggagaagcagtggatccaggaggaccaggcctcatacatctccttcaatgcggcctccaactcgcggtcccaaatcaaggctgccttggacaatgcgggaaagattatgagcctgactaaaaccgcccccgactacctggtgggccagcagcccgtggaggacatttccagcaatcggatttataaaattttggaactaaacgggtacgatccccaatatgcggcttccgtctttctgggatgggccacgaaaaagttcggcaagaggaacaccatctggctgtttgggcctgcaactaccgggaagaccaacatcgcggaggccatagcccacactgtgcccttctacgggtgcgtaaactggaccaatgagaactttcccttcaacgactgtgtcgacaagatggtgatctggtgggaggaggggaagatgaccgccaaggtcgtggagtcggccaaagccattctcggaggaagcaaggtgcgcgtggaccagaaatgcaagtcctcggcccagatagacccgactcccgtgatcgtcacctccaacaccaacatgtgcgccgtgattgacgggaactcaacgaccttcgaacaccagcagccgttgcaagaccggatgttcaaatttgaactcacccgccgtctggatcatgactttgggaaggtcaccaagcaggaagtcaaagactttttccggtgggcaaaggatcacgtggttgaggtggagcatgaattctacgtcaaaaagggtggagccaagaaaagacccgcccccagtgacgcagatataagtgagcccaaacgggtgcgcgagtcagttgcgcagccatcgacgtcagacgcggaagcttcgatcaactacgcagacaggtaccaaaacaaatgttctcgtcacgtgggcatgaatctgatgctgtttccctgcagacaatgcgagagaatgaatcagaattcaaatatctgcttcactcacggacagaaagactgtttagagtgctttcccgtgtcagaatctcaacccgtttctgtcgtcaaaaaggcgtatcagaaactgtgctacattcatcatatcatgggaaaggtgccagacgcttgcactgcctgcgatctggtcaatgtggatttggatgactgcatctttgaacaataaatgatttaaatcaggtatggctgccgatggttatcttccagattggctcgaggacaacctctctgagggcattcgcgagtggtgggcgctgaaacctggagccccgaagcccaaagccaaccagcaaaagcaggacgacggccggggtctggtgcttcctggctacaagtacctcggacccttcaacggactcgacaagggggagcccgtcaacgcggcggacgcagcggccctcgagcacgacaaggcctacgaccagcagctgcaggcgggtgacaatccgtacctgcggtataaccacgccgacgccgagtttcaggagcgtctgcaagaagatacgtcttttgggggcaacctcgggcgagcagtcttccaggccaagaagcgggttctcgaacctctcggtctggtagaggaaggcgctaagacggctcctggaaagaagagaccggtagagccatcaccccagcgttctccagactcctctacgggcatcggcaagaaaggccaacagcccgccagaaaaagactcaattttggtcagactggcgactcagagtcagttccagaccctcaacctctcggagaacctccagcagcgccctctggtgtgggacctaatacaatggctgcaggcggtggcgcaccaatggcagacaataacgaaggcgccgacggagtgggtagttcctcgggaaattggcattgcgattccacatggctgggcgacagagtcatcaccaccagcacccgaacctgggccctgcccacctacaacaaccacctctacaagcaaatctccaacgggacatcgggaggagccaccaacgacaacacctacttcggctacagcaccccctgggggtattttgactttaacagattccactgccacttttcaccacgtgactggcagcgactcatcaacaacaactggggattccggcccaagagactcagcttcaagctcttcaacatccaggtcaaggaggtcacgcagaatgaaggcaccaagaccatcgccaataacctcaccagcaccatccaggtgtttacggactcggagtaccagctgccgtacgttctcggctctgcccaccagggctgcctgcctccgttcccggcggacgtgttcatgattccccagtacggctacctaacactcaacaacggtagtcaggccgtgggacgctcctccttctactgcctggaatactttccttcgcagatgctgagaaccggcaacaacttccagtttacttacaccttcgaggacgtgcctttccacagcagctacgcccacagccagagcttggaccggctgatgaatcctctgattgaccagtacctgtactacttgtctcggactcaaacaacaggaggcacggcaaatacgcagactctgggcttcagccaaggtgggcctaatacaatggccaatcaggcaaagaactggctgccaggaccctgttaccgccaacaacgcgtctcaacgacaaccgggcaaaacaacaatagcaactttgcctggactgctgggaccaaataccatctgaatggaagaaattcattggctaatcctggcatcgctatggcaacacacaaagacgacgaggagcgtttttttcccagtaacgggatcctgatttttggcaaacaaaatgctgccagagacaatgcggattacagcgatgtcatgctcaccagcgaggaagaaatcaaaaccactaaccctgtggctacagaggaatacggtatcgtggcagataacttgcagcagcaaaacacggctcctcaaattggaactgtcaacagccagggggccttacccggtatggtctggcagaaccgggacgtgtacctgcagggtcccatctgggccaagattcctcacacggacggcaacttccacccgtctccgctgatgggcggctttggcctgaaacatcctccgcctcagatcctgatcaagaacacgcctgtacctgcggatcctccgaccaccttcaaccagtcaaagctgaactctttcatcacgcaatacagcaccggacaggtcagcgtggaaattgaatgggagctgcagaaggaaaacagcaagcgctggaaccccgagatccagtacacctccaactactacaaatctacaagtgtggactttgctgttaatacagaaggcgtgtactctgaaccccgccccattggcacccgttacctcacccgtaatctgtaa

SEQ ID NO: 218 - DNA, 9825 bp, synthetic construct
  source 1..9825: mol_type = other DNA
atgccggggttttacgagattgtgattaaggtccccagcgaccttgacgagcatctgcccggcatttctgacagctttgtgaactgggtggccgagaaggaatgggagttgccgccagattctgacatggatctgaatctgattgagcaggcacccctgaccgtggccgagaagctgcagcgcgactttctgacggaatggcgccgtgtgagtaaggccccggaggctcttttctttgtgcaatttgagaagggagagagctacttccacatgcacgtgctcgtggaaaccaccggggtgaaatccatggttttgggacgtttcctgagtcagattcgcgaaaaactgattcagagaatttaccgcgggatcgagccgactttgccaaactggttcgcggtcacaaagaccagaaatggcgccggaggcgggaacaaggtggtggatgagtgctacatccccaattacttgctccccaaaacccagcctgagctccagtgggcgtggactaatatggaacagtatttaagcgcctgtttgaatctcacggagcgtaaacggttggtggcgcagcatctgacgcacgtgtcgcagacgcaggagcagaacaaagagaatcagaatcccaattctgatgcgccggtgatcagatcaaaaacttcagccaggtacatggagctggtcgggtggctcgtggacaaggggattacctcggagaagcagtggatccaggaggaccaggcctcatacatctccttcaatgcggcctccaactcgcggtcccaaatcaaggctgccttggacaatgcgggaaagattatgagcctgactaaaaccgcccccgactacctggtgggccagcagcccgtggaggacatttccagcaatcggatttataaaattttggaactaaacgggtacgatccccaatatgcggcttccgtctttctgggatgggccacgaaaaagttcggcaagaggaacaccatctggctgtttgggcctgcaactaccgggaagaccaacatcgcggaggccatagcccacactgtgcccttctacgggtgcgtaaactggaccaatgagaactttcccttcaacgactgtgtcgacaagatggtgatctggtgggaggaggggaagatgaccgccaaggtcgtggagtcggccaaagccattctcggaggaagcaaggtgcgcgtggaccagaaatgcaagtcctcggcccagatagacccgactcccgtgatcgtcacctccaacaccaacatgtgcgccgtgattgacgggaactcaacgaccttcgaacaccagcagccgttgcaagaccggatgttcaaatttgaactcacccgccgtctggatcatgactttgggaaggtcaccaagcaggaagtcaaagactttttccggtgggcaaaggatcacgtggttgaggtggagcatgaattctacgtcaaaaagggtggagccaagaaaagacccgcccccagtgacgcagatataagtgagcccaaacgggtgcgcgagtcagttgcgcagccatcgacgtcagacgcggaagcttcgatcaactacgcagacaggtaccaaaacaaatgttctcgtcacgtgggcatgaatctgatgctgtttccctgcagacaatgcgagagaatgaatcagaattcaaatatctgcttcactcacggacagaaagactgtttagagtgctttcccgtgtcagaatctcaacccgtttctgtcgtcaaaaaggcgtatcagaaactgtgctacattcatcatatcatgggaaaggtgccagacgcttgcactgcctgcgatctggtcaatgtggatttggatgactgcatctttgaacaataaatgatttaaatcaggtatggctgccgatggttatcttccagattggctcgaggacaacctctctgagggcattcgcgagtggtgggcgctgaaacctggagccccgaagcccaaagccaaccagcaaaagcaggacgacggccggggtctggtgcttcctggctacaagtacctcggacccttcaacggactcgacaagggggagcccgtcaacgcggcggacgcagcggccctcgagcacgacaaggcctacgaccagcagctgcaggcgggtgacaatccgtacctgcggtataaccacgccgacgccgagtttcaggagcgtctgcaagaagatacgtcttttgggggcaacctcgggcgagcagtcttccaggccaagaagcgggttctcgaacctctcggtctggtagaggaaggcgctaagacggctcctggaaagaagagaccggtagagccatcaccccagcgttctccagactcctctacgggcatcggcaagaaaggccaacagcccgccagaaaaagactcaattttggtcagactggcgactcagagtcagttccagaccctcaacctctcggagaacctccagcagcgccctctggtgtgggacctaatacaatggctgcaggcggtggcgcaccaatggcagacaataacgaaggcgccgacggagtgggtagttcctcgggaaattggcattgcgattccacatggctgggcgacagagtcatcaccaccagcacccgaacctgggccctgcccacctacaacaaccacctctacaagcaaatctccaacgggacatcgggaggagccaccaacgacaacacctacttcggctacagcaccccctgggggtattttgactttaacagattccactgccacttttcaccacgtgactggcagcgactcatcaacaacaactggggattccggcccaagagactcagcttcaagctcttcaacatccaggtcaaggaggtcacgcagaatgaaggcaccaagaccatcgccaataacctcaccagcaccatccaggtgtttacggactcggagtaccagctgccgtacgttctcggctctgcccaccagggctgcctgcctccgttcccggcggacgtgttcatgattccccagtacggctacctaacactcaacaacggtagtcaggccgtgggacgctcctccttctactgcctggaatactttccttcgcagatgctgagaaccggcaacaacttccagtttacttacaccttcgaggacgtgcctttccacagcagctacgcccacagccagagcttggaccggctgatgaatcctctgattgaccagtacctgtactacttgtctcggactcaaacaacaggaggcacggcaaatacgcagactctgggcttcagccaaggtgggcctaatacaatggccaatcaggcaaagaactggctgccaggaccctgttaccgccaacaacgcgtctcaacgacaaccgggcaaaacaacaatagcaactttgcctggactgctgggaccaaataccatctgaatggaagaaattcattggctaatcctggcatcgctatggcaacacacaaagacgacgaggagcgtttttttcccagtaacgggatcctgatttttggcaaacaaaatgctgccagagacaatgcggattacagcgatgtcatgctcaccagcgaggaagaaatcaaaaccactaaccctgtggctacagaggaatacggtatcgtggcagataacttgcagcagcaaaacacggctcctcaaattggaactgtcaacagccagggggccttacccggtatggtctggcagaaccgggacgtgtacctgcagggtcccatctgggccaagattcctcacacggacggcaacttccacccgtctccgctgatgggcggctttggcctgaaacatcctccgcctcagatcctgatcaagaacacgcctgtacctgcggatcctccgaccaccttcaaccagtcaaagctgaactctttcatcacgcaatacagcaccggacaggtcagcgtggaaattgaatgggagctgcagaaggaaaacagcaagcgctggaaccccgagatccagtacacctccaactactacaaatctacaagtgtggactttgctgttaatacagaaggcgtgtactctgaaccccgccccattggcacccgttacctcacccgtaatctgtaattgcctgttaatcaataaaccggttgattcgtttcagttgaactttggtctctgcgaagggcgaattcgtttaaacctgcaggactagagccgaattctgcatcgcgatagggataacagggtaataaataatgtactagagacactttcaataaaggcaaatgcttttatttgtacactctcgggtgattatttacccccacccttgccgtctgcgccgttcagaagtcgaaggggttctgtctggcatcggaatgggccacgggcagagacacgttccggtactggtgcttggtggaccacttgaactcaggcacgaccattctaggcagctctgtgaagttctcgctccacaggctccgcaccatcaccagggcgttcagcaggtcaggggcgctgattttgaagtcgcagttaggtccgccgccctgggctctgctgtttctgtacacagggttgcagcactggaacacaataagagcagggtggtgcacgctggccagcacagacttgtcgctgatcaggtcggcgtcgagatcctcggcgttagacaaggcaaaaggggtcagcttgggcagctggcggcccaggaaaggggcgtggccgggcttgctattgcactcgcatctcagaggcatcagcaggtggccgtggccggtctgggcgttggggtacagggcctgcataaaggccttgatctgtttgaaggccacttgggccttggcgccttcggagaagaacatgccgcagcttttgccgctgaactggttggcggggcaggcggcgtcgtgcacacaacaccgggcgtcggtattgctgatctgcaccacgtttctgccccatctgttcttcacgatcttggccttgctgctctgctctttcagggccctctggccgttctcagaggtgacgtccatctcgatcacatgttccttgttgatcatgatgctgccgtgcagacacttcagctcgccctcgatttccgcgcatctgtgcagccacagggcacaaccggtaggctcgtggtgcttgtatgtcacctcagcaaaagattgcaggtaggcttgcaggaatctgcccatcatggtcacgaaggtcttgttggaggtaaaagtcagctgcagtcctctgtgttcctcgttcagccatgtcttgcacacggcggccagagcctcgacctgatctggcagcagcttgaaattagccttcaggtcgttgtccacgtgatacttatccatcagtgctctggcggcttccatgcccttctcccaggcggaaacgatgggcacgctcagggggttcatcacggtgatctcgctttcagcttctgaaggttcctcctcttcctcctgtgttctcatgccccgagccacggggtcgtcctcattcagtctccgcacggttctttttcctccctttccgtgcttaatcagtacaggaggattagagaagcccaccatctggagggcgacgtcctccctttcttcttcgctatccacgatcacttctgggctggggggccgttcaggctttgggctaggccgtttttttttcttcttaggggcgatagccagatcagcggcgcttgtagagggccgaggactaggggttctaggcacgagggcgtcctggctgctgtcctcctcatcctcgctctcgatccgtctccgcattctcttcttagggggggcccgcggagggggagggctagggctaggggacgacacatcttccatggttggaggtctgcgagcagcgcctctgcctctctctggtgttgtctcgcgctgttcttcctctctagaggccatttccttctcctataggcagaaaaagatcgttgaaactcactccggggctgtggacgtcggcttaccttcgcaaatttgtacctgaggactaccacgcccacgagattaggttctacgaagaccaatcccgcccgcctaatgcggagcttaccgcctgcgtcattacccagggccacattcttggccaattgcaagccatcaacaaagcccgccaagagtttctgctacgaaagggacggggggtttacttggacccccagtccggcgaggagctcaacccaatccccccgccgccgcagccctatcagcagcagccgcgggcccttgcttcccaggatggcacccaaaaagaagctgcagctgccgccgccacccacggacgaggaggaatactgggacagtcaggcagaggaggttttggacgaggaggaggaggacatgatggaagactgggagagcctagacgaggaagcttccgaggtcgaagaggtgtcagacgaaacaccgtcaccctcggtcgcattcccctcgccggcgccccagaaatcggcaaccggttccagcatggctacaacctccgctcctcaggcgccgccggcactgcccgttcgccgacccaaccgtagatgggacaccactggaaccagggccggtaagtccaagcagccgccgccgttagcccaagagcaacaacagcgccaaggctaccgctcatggcgcgggcacaagaacgccatagttgcttgcttgcaagactgtgggggcaacatctccttcgcccgccgctttcttctctaccatcacggcgtggccttcccccgtaacatcctgcattactaccgtcatctctacagcccatactgcaccggcggcagcggcagcaacagcagcggccacacagaagcaaaggcgaccggatagcaagactctgacaaagcccaagaaatccacagcggcggcagcagcaggaggaggagcgctgcgtctggcgcccaacgaacccgtatcgacccgcgagcttagaaacaggatttttcccactctgtatgctatatttcaacagagcaggggccaagaacaagagctgaaaataaaaaacaggtctctgcgatccctcacccgcagctgcctgtatcacaaaagcgaagatcagcttcggcgcacgctggaagacgcggaggctctcttcagtaaatactgcgcgctgactcttaaggactagtttcgcgccctttctcaaatttaagcgcgaaaactacgtcatctccagcggccacacccggcgccagcacctgttgtcagcgccattttttagggcggagtaacttgtatgtgttgggaattgtagttttcttaaaatgggaagtgacgtaacgtgggaaaacggaagtgacgatttgaggaagttgtgggttttttggctttcgtttctgggcgtaggttcgcgtgcggttttctgggtgttttttgtggactttaaccgttacgtcattttttagtcctatatatactcgctctgcacttggcccttttttacactgtgactgattgagctggtgccgtgtcgagtggtgtttttttaataggttttcttttttactggtaaggctgactgttatgactacgtccggcgttccatttggcatgacactacgaccaacacgatctcggttgtctcggcgcactccgtacagtagggatcgtctacctccttttgagacagaaacccgcgctaccatactggaggatcatccgctgctgcccgaatgtaacactttgacaatgcacaacgtgagttacgtgcgaggtcttccctgcagtgtgggatttacgctgattcaggaatgggttgttccctgggatatggttctaacgcgggaggagcttgtaatcctgaggaagtgtatgcacgtgtgcctgtgttgtgccaacattgatatcatgacgagcatgatgatccatggttacgagtcctgggctctccactgtcattgttccagtcccggttccctgcagtgtatagccggcgggcaggttttggccagctggtttaggatggtggtggatggcgccatgtttaatcagaggtttatatggtaccgggaggtggtgaattacaacatgccaaaagaggtaatgtttatgtccagcgtgtttatgaggggtcgccacttaatctacctgcgcttgtggtatgatggccacgtgggttctgtggtccccgccatgagctttggatacagcgccttgcactgtgggattttgaacaatattgtggtgctgtgctgcagttactgtgctgatttaagtgagatcagggtgcgctgctgtgcccggaggacaaggcgccttatgctgcgggcggtgcgaatcatcgctgaggagaccactgccatgttgtattcctgcaggacggagcggcggcggcagcagtttattcgcgcgctgctgcagcaccaccgccctatcctgatgcacgattatgactctacccccatgtaggcgtggacttctccttcgccgcccgttaagcaaccgcaagttggacagcagcctgtggctcagcagctggacagcgacatgaacttaagtgagctgcccggggagtttattaatatcactgatgagcgtttggctcgacaggaaaccgtgtggaatataacacctaagaatatgtctgttacccatgatatgatgctttttaaggccagccggggagaaaggactgtgtactctgtgtgttgggagggaggtggcaggttgaatactagggttctgtgagtttgattaaggtacggtgatctgtataagctatgtggtggtggggctatactactgaatgaaaaatgacttgaaattttctgcaattgaaaaataaacacgttgaaacataacacaaacgattctttattcttgggcaatgtatgaaaaagtgtaagaggatgtggcaaatatttcattaatgtagttgtggccagaccagtcccatgaaaatgacatagagtatgcacttggagttgtgtctcctgtttcctgtgtaccgtttagtgtaatggttagtgttacaggtttagttttgtctccgtttaagtaaacttgactgacaatgttacttttggcagttttaccgtgagattttggataagctgataggttaggcataaatccaacagcgtttgtataggctgtcgcccctcctgacgcggtaggaggaggggagggtgccctgcatgtctgccgctgctcttgctcttgccgctgctgaggaggggggcgcatctgccgcagcaccggatgcatctgggaaaagcaaaaaaggggctcgtccctgtttccggaggaatttgcaagcggggtcttgcatgacggggaggcaaacccccgttcgccgcagtccggccggtccgagactcgaaccgggggtcccgcgactcaacccttggaaaataaccctccggctacagggagcgagccacttaatgctttcgctttccagcctaaccgcttacgctgcgcgcggccagtggccaaaaaagctagcgcagcagccgccgcgcctggaaggaagccaaaaggagcactcccccgttgtctgacgtcgcacacctgggttcgacacgcgggcggtaaccgcatggatcacggcggacggccggatacggggctcgaaccccggtcgtccgccatgatacccttgcgaatttatccaccagaccacggaagagtgcccgcttacaggctctccttttgcacggtctagagcgtcaacgattgcgcgcgcctgaccggccagagcgtcccgaccatggagcactttttgccgctgcgcaacatctggaaccgcgtccgcgactttccgcgcgcctccaccaccgccgccggcatcacctggatgtccaggtacatctacggata

SEQ ID NO: 219 - DNA, 12588 bp, synthetic construct
  source 1..12588: mol_type = other DNA
tcgcgcgtttcggtgatgacggtgaaaacctctgacacatgcagctcccggagacggtcacagcttgtctgtaagcggatgccgggagcagacaagcccgtcagggcgcgtcagcgggtgttggcgggtgtcggggctggcttaactatgcggcatcagagcagattgtactgagagtgcaccatatgcggtgtgaaataccgcacagatgcgtaaggagaaaataccgcatcaggcgccattcgccattcaggctgcgcaactgttgggaagggcgatcggtgcgggcctcttcgctattacgccagctggcgaaagggggatgtgctgcaaggcgattaagttgggtaacgccagggttttcccagtcacgacgttgtaaaacgacggccagagaattccgcagggtctccattttgaagcgggaggtttgaacgcgcagccgccatgccggggttttacgagattgtgattaaggtccccagcgaccttgacgagcatctgcccggcatttctgacagctttgtgaactgggtggccgagaaggaatgggagttgccgccagattctgacatggatctgaatctgattgagcaggcacccctgaccgtggccgagaagctgcagcgcgactttctgacggaatggcgccgtgtgagtaaggccccggaggctcttttctttgtgcaatttgagaagggagagagctacttccacatgcacgtgctcgtggaaaccaccggggtgaaatccatggttttgggacgtttcctgagtcagattcgcgaaaaactgattcagagaatttaccgcgggatcgagccgactttgccaaactggttcgcggtcacaaagaccagaaatggcgccggaggcgggaacaaggtggtggatgagtgctacatccccaattacttgctccccaaaacccagcctgagctccagtgggcgtggactaatatggaacagtatttaagcgcctgtttgaatctcacggagcgtaaacggttggtggcgcagcatctgacgcacgtgtcgcagacgcaggagcagaacaaagagaatcagaatcccaattctgatgcgccggtgatcagatcaaaaacttcagccaggtacatggagctggtcgggtggctcgtggacaaggggattacctcggagaagcagtggatccaggaggaccaggcctcatacatctccttcaatgcggcctccaactcgcggtcccaaatcaaggctgccttggacaatgcgggaaagattatgagcctgactaaaaccgcccccgactacctggtgggccagcagcccgtggaggacatttccagcaatcggatttataaaattttggaactaaacgggtacgatccccaatatgcggcttccgtctttctgggatgggccacgaaaaagttcggcaagaggaacaccatctggctgtttgggcctgcaactaccgggaagaccaacatcgcggaggccatagcccacactgtgcccttctacgggtgcgtaaactggaccaatgagaactttcccttcaacgactgtgtcgacaagatggtgatctggtgggaggaggggaagatgaccgccaaggtcgtggagtcggccaaagccattctcggaggaagcaaggtgcgcgtggaccagaaatgcaagtcctcggcccagatagacccgactcccgtgatcgtcacctccaacaccaacatgtgcgccgtgattgacgggaactcaacgaccttcgaacaccagcagccgttgcaagaccggatgttcaaatttgaactcacccgccgtctggatcatgactttgggaaggtcaccaagcaggaagtcaaagactttttccggtgggcaaaggatcacgtggttgaggtggagcatgaattctacgtcaaaaagggtggagccaagaaaagacccgcccccagtgacgcagatataagtgagcccaaacgggtgcgcgagtcagttgcgcagccatcgacgtcagacgcggaagcttcgatcaactacgcagacaggtaccaaaacaaatgttctcgtcacgtgggcatgaatctgatgctgtttccctgcagacaatgcgagagaatgaatcagaattcaaatatctgcttcactcacggacagaaagactgtttagagtgctttcccgtgtcagaatctcaacccgtttctgtcgtcaaaaaggcgtatcagaaactgtgctacattcatcatatcatgggaaaggtgccagacgcttgcactgcctgcgatctggtcaatgtggatttggatgactgcatctttgaacaataaatgatttaaatcaggtatggctgccgatggttatcttccagattggctcgaggacaacctctctgagggcattcgcgagtggtgggcgctgaaacctggagccccgaagcccaaagccaaccagcaaaagcaggacgacggccggggtctggtgcttcctggctacaagtacctcggacccttcaacggactcgacaagggggagcccgtcaacgcggcggacgcagcggccctcgagcacgacaaggcctacgaccagcagctgcaggcgggtgacaatccgtacctgcggtataaccacgccgacgccgagtttcaggagcgtctgcaagaagatacgtcttttgggggcaacctcgggcgagcagtcttccaggccaagaagcgggttctcgaacctctcggtctggtagaggaaggcgctaagacggctcctggaaagaagagaccggtagagccatcaccccagcgttctccagactcctctacgggcatcggcaagaaaggccaacagcccgccagaaaaagactcaattttggtcagactggcgactcagagtcagttccagaccctcaacctctcggagaacctccagcagcgccctctggtgtgggacctaatacaatggctgcaggcggtggcgcaccaatggcagacaataacgaaggcgccgacggagtgggtagttcctcgggaaattggcattgcgattccacatggctgggcgacagagtcatcaccaccagcacccgaacctgggccctgcccacctacaacaaccacctctacaagcaaatctccaacgggacatcgggaggagccaccaacgacaacacctacttcggctacagcaccccctgggggtattttgactttaacagattccactgccacttttcaccacgtgactggcagcgactcatcaacaacaactggggattccggcccaagagactcagcttcaagctcttcaacatccaggtcaaggaggtcacgcagaatgaaggcaccaagaccatcgccaataacctcaccagcaccatccaggtgtttacggactcggagtaccagctgccgtacgttctcggctctgcccaccagggctgcctgcctccgttcccggcggacgtgttcatgattccccagtacggctacctaacactcaacaacggtagtcaggccgtgggacgctcctccttctactgcctggaatactttccttcgcagatgctgagaaccggcaacaacttccagtttacttacaccttcgaggacgtgcctttccacagcagctacgcccacagccagagcttggaccggctgatgaatcctctgattgaccagtacctgtactacttgtctcggactcaaacaacaggaggcacggcaaatacgcagactctgggcttcagccaaggtgggcctaatacaatggccaatcaggcaaagaactggctgccaggaccctgttaccgccaacaacgcgtctcaacgacaaccgggcaaaacaacaatagcaactttgcctggactgctgggaccaaataccatctgaatggaagaaattcattggctaatcctggcatcgctatggcaacacacaaagacgacgaggagcgtttttttcccagtaacgggatcctgatttttggcaaacaaaatgctgccagagacaatgcggattacagcgatgtcatgctcaccagcgaggaagaaatcaaaaccactaaccctgtggctacagaggaatacggtatcgtggcagataacttgcagcagcaaaacacggctcctcaaattggaactgtcaacagccagggggccttacccggtatggtctggcagaaccgggacgtgtacctgcagggtcccatctgggccaagattcctcacacggacggcaacttccacccgtctccgctgatgggcggctttggcctgaaacatcctccgcctcagatcctgatcaagaacacgcctgtacctgcggatcctccgaccaccttcaaccagtcaaagctgaactctttcatcacgcaatacagcaccggacaggtcagcgtggaaattgaatgggagctgcagaaggaaaacagcaagcgctggaaccccgagatccagtacacctccaactactacaaatctacaagtgtggactttgctgttaatacagaaggcgtgtactctgaaccccgccccattggcacccgttacctcacccgtaatctgtaattgcctgttaatcaataaaccggttgattcgtttcagttgaactttggtctctgcgaagggcgaattcgtttaaacctgcaggactagagccgaattctgcatcgcgatagggataacagggtaataaataatgtactagagacactttcaataaaggcaaatgcttttatttgtacactctcgggtgattatttacccccacccttgccgtctgcgccgttcagaagtcgaaggggttctgtctggcatcggaatgggccacgggcagagacacgttccggtactggtgcttggtggaccacttgaactcaggcacgaccattctaggcagctctgtgaagttctcgctccacaggctccgcaccatcaccagggcgttcagcaggtcaggggcgctgattttgaagtcgcagttaggtccgccgccctgggctctgctgtttctgtacacagggttgcagcactggaacacaataagagcagggtggtgcacgctggccagcacagacttgtcgctgatcaggtcggcgtcgagatcctcggcgttagacaaggcaaaaggggtcagcttgggcagctggcggcccaggaaaggggcgtggccgggcttgctattgcactcgcatctcagaggcatcagcaggtggccgtggccggtctgggcgttggggtacagggcctgcataaaggccttgatctgtttgaaggccacttgggccttggcgccttcggagaagaacatgccgcagcttttgccgctgaactggttggcggggcaggcggcgtcgtgcacacaacaccgggcgtcggtattgctgatctgcaccacgtttctgccccatctgttcttcacgatcttggccttgctgctctgctctttcagggccctctggccgttctcagaggtgacgtccatctcgatcacatgttccttgttgatcatgatgctgccgtgcagacacttcagctcgccctcgatttccgcgcatctgtgcagccacagggcacaaccggtaggctcgtggtgcttgtatgtcacctcagcaaaagattgcaggtaggcttgcaggaatctgcccatcatggtcacgaaggtcttgttggaggtaaaagtcagctgcagtcctctgtgttcctcgttcagccatgtcttgcacacggcggccagagcctcgacctgatctggcagcagcttgaaattagccttcaggtcgttgtccacgtgatacttatccatcagtgctctggcggcttccatgcccttctcccaggcggaaacgatgggcacgctcagggggttcatcacggtgatctcgctttcagcttctgaaggttcctcctcttcctcctgtgttctcatgccccgagccacggggtcgtcctcattcagtctccgcacggttctttttcctccctttccgtgcttaatcagtacaggaggattagagaagcccaccatctggagggcgacgtcctccctttcttcttcgctatccacgatcacttctgggctggggggccgttcaggctttgggctaggccgtttttttttcttcttaggggcgatagccagatcagcggcgcttgtagagggccgaggactaggggttctaggcacgagggcgtcctggctgctgtcctcctcatcctcgctctcgatccgtctccgcattctcttcttagggggggcccgcggagggggagggctagggctaggggacgacacatcttccatggttggaggtctgcgagcagcgcctctgcctctctctggtgttgtctcgcgctgttcttcctctctagaggccatttccttctcctataggcagaaaaagatcgttgaaactcactccggggctgtggacgtcggcttaccttcgcaaatttgtacctgaggactaccacgcccacgagattaggttctacgaagaccaatcccgcccgcctaatgcggagcttaccgcctgcgtcattacccagggccacattcttggccaattgcaagccatcaacaaagcccgccaagagtttctgctacgaaagggacggggggtttacttggacccccagtccggcgaggagctcaacccaatccccccgccgccgcagccctatcagcagcagccgcgggcccttgcttcccaggatggcacccaaaaagaagctgcagctgccgccgccacccacggacgaggaggaatactgggacagtcaggcagaggaggttttggacgaggaggaggaggacatgatggaagactgggagagcctagacgaggaagcttccgaggtcgaagaggtgtcagacgaaacaccgtcaccctcggtcgcattcccctcgccggcgccccagaaatcggcaaccggttccagcatggctacaacctccgctcctcaggcgccgccggcactgcccgttcgccgacccaaccgtagatgggacaccactggaaccagggccggtaagtccaagcagccgccgccgttagcccaagagcaacaacagcgccaaggctaccgctcatggcgcgggcacaagaacgccatagttgcttgcttgcaagactgtgggggcaacatctccttcgcccgccgctttcttctctaccatcacggcgtggccttcccccgtaacatcctgcattactaccgtcatctctacagcccatactgcaccggcggcagcggcagcaacagcagcggccacacagaagcaaaggcgaccggatagcaagactctgacaaagcccaagaaatccacagcggcggcagcagcaggaggaggagcgctgcgtctggcgcccaacgaacccgtatcgacccgcgagcttagaaacaggatttttcccactctgtatgctatatttcaacagagcaggggccaagaacaagagctgaaaataaaaaacaggtctctgcgatccctcacccgcagctgcctgtatcacaaaagcgaagatcagcttcggcgcacgctggaagacgcggaggctctcttcagtaaatactgcgcgctgactcttaaggactagtttcgcgccctttctcaaatttaagcgcgaaaactacgtcatctccagcggccacacccggcgccagcacctgttgtcagcgccattttttagggcggagtaacttgtatgtgttgggaattgtagttttcttaaaatgggaagtgacgtaacgtgggaaaacggaagtgacgatttgaggaagttgtgggttttttggctttcgtttctgggcgtaggttcgcgtgcggttttctgggtgttttttgtggactttaaccgttacgtcattttttagtcctatatatactcgctctgcacttggcccttttttacactgtgactgattgagctggtgccgtgtcgagtggtgtttttttaataggttttcttttttactggtaaggctgactgttatgactacgtccggcgttccatttggcatgacactacgaccaacacgatctcggttgtctcggcgcactccgtacagtagggatcgtctacctccttttgagacagaaacccgcgctaccatactggaggatcatccgctgctgcccgaatgtaacactttgacaatgcacaacgtgagttacgtgcgaggtcttccctgcagtgtgggatttacgctgattcaggaatgggttgttccctgggatatggttctaacgcgggaggagcttgtaatcctgaggaagtgtatgcacgtgtgcctgtgttgtgccaacattgatatcatgacgagcatgatgatccatggttacgagtcctgggctctccactgtcattgttccagtcccggttccctgcagtgtatagccggcgggcaggttttggccagctggtttaggatggtggtggatggcgccatgtttaatcagaggtttatatggtaccgggaggtggtgaattacaacatgccaaaagaggtaatgtttatgtccagcgtgtttatgaggggtcgccacttaatctacctgcgcttgtggtatgatggccacgtgggttctgtggtccccgccatgagctttggatacagcgccttgcactgtgggattttgaacaatattgtggtgctgtgctgcagttactgtgctgatttaagtgagatcagggtgcgctgctgtgcccggaggacaaggcgccttatgctgcgggcggtgcgaatcatcgctgaggagaccactgccatgttgtattcctgcaggacggagcggcggcggcagcagtttattcgcgcgctgctgcagcaccaccgccctatcctgatgcacgattatgactctacccccatgtaggcgtggacttctccttcgccgcccgttaagcaaccgcaagttggacagcagcctgtggctcagcagctggacagcgacatgaacttaagtgagctgcccggggagtttattaatatcactgatgagcgtttggctcgacaggaaaccgtgtggaatataacacctaagaatatgtctgttacccatgatatgatgctttttaaggccagccggggagaaaggactgtgtactctgtgtgttgggagggaggtggcaggttgaatactagggttctgtgagtttgattaaggtacggtgatctgtataagctatgtggtggtggggctatactactgaatgaaaaatgacttgaaattttctgcaattgaaaaataaacacgttgaaacataacacaaacgattctttattcttgggcaatgtatgaaaaagtgtaagaggatgtggcaaatatttcattaatgtagttgtggccagaccagtcccatgaaaatgacatagagtatgcacttggagttgtgtctcctgtttcctgtgtaccgtttagtgtaatggttagtgttacaggtttagttttgtctccgtttaagtaaacttgactgacaatgttacttttggcagttttaccgtgagattttggataagctgataggttaggcataaatccaacagcgtttgtataggctgtcgcccctcctgacgcggtaggaggaggggagggtgccctgcatgtctgccgctgctcttgctcttgccgctgctgaggaggggggcgcatctgccgcagcaccggatgcatctgggaaaagcaaaaaaggggctcgtccctgtttccggaggaatttgcaagcggggtcttgcatgacggggaggcaaacccccgttcgccgcagtccggccggtccgagactcgaaccgggggtcccgcgactcaacccttggaaaataaccctccggctacagggagcgagccacttaatgctttcgctttccagcctaaccgcttacgctgcgcgcggccagtggccaaaaaagctagcgcagcagccgccgcgcctggaaggaagccaaaaggagcactcccccgttgtctgacgtcgcacacctgggttcgacacgcgggcggtaaccgcatggatcacggcggacggccggatacggggctcgaaccccggtcgtccgccatgatacccttgcgaatttatccaccagaccacggaagagtgcccgcttacaggctctccttttgcacggtctagagcgtcaacgattgcgcgcgcctgaccggccagagcgtcccgaccatggagcactttttgccgctgcgcaacatctggaaccgcgtccgcgactttccgcgcgcctccaccaccgccgccggcatcacctggatgtccaggtacatctacggatatggcaaacagctattatgggtattatgggtgcggccgcggatcccgggcccgtcgactgcagaggcctgcatgcaagcttggtgtaatcatggtcatagctgtttcctgtgtgaaattgttatccgctcacaattccacacaacatacgagccggaagcataaagtgtaaagcctggggtgcctaatgagtgagctaactcacattaattgcgttgcgctcactgcccgctttccagtcgggaaacctgtcgtgccagctgcattaatgaatcggccaacgcgcggggagaggcggtttgcgtattgggcgctcttccgcttcctcgctcactgactcgctgcgctcggtcgttcggctgcggcgagcggtatcagctcactcaaaggcggtaatacggttatccacagaatcaggggataacgcaggaaagaacatgtgagcaaaaggccagcaaaaggccaggaaccgtaaaaaggccgcgttgctggcgtttttccataggctccgcccccctgacgagcatcacaaaaatcgacgctcaagtcagaggtggcgaaacccgacaggactataaagataccaggcgtttccccctggaagctccctcgtgcgctctcctgttccgaccctgccgcttaccggatacctgtccgcctttctcccttcgggaagcgtggcgctttctcatagctcacgctgtaggtatctcagttcggtgtaggtcgttcgctccaagctgggctgtgtgcacgaaccccccgttcagcccgaccgctgcgccttatccggtaactatcgtcttgagtccaacccggtaagacacgacttatcgccactggcagcagccactggtaacaggattagcagagcgaggtatgtaggcggtgctacagagttcttgaagtggtggcctaactacggctacactagaagaacagtatttggtatctgcgctctgctgaagccagttaccttcggaaaaagagttggtagctcttgatccggcaaacaaaccaccgctggtagcggtggtttttttgtttgcaagcagcagattacgcgcagaaaaaaaggatctcaagaagatcctttgatcttttctacggggtctgacgctcagtggaacgaaaactcacgttaagggattttggtcatgagattatcaaaaaggatcttcacctagaaggtcctgtattagaggtcacgtgagtgttttgcgacattttgcgacaccatgtggtcacgctgggtatttaagcccgagtgagcacgcagggtctccattttgaagcgggaggtttgaacgcgcagccgccatccttttaaattaaaaatgaagttttaaatcaagcccaatctgaataatgttacaaccaattaaccaattctgattagaaaaactcatcgagcatcaaatgaaactgcaatttattcatatcaggattatcaataccatatttttgaaaaagccgtttctgtaatgaaggagaaaactcaccgaggcagttccataggatggcaagatcctggtatcggtctgcgattccgactcgtccaacatcaatacaacctattaatttcccctcgtcaaaaataaggttatcaagtgagaaatcaccatgagtgacgactgaatccggtgagaatggcaaaagtttatgcatttctttccagacttgttcaacaggccagccattacgctcgtcatcaaaatcactcgcatcaaccaaaccgttattcattcgtgattgcgcctgagcgagacgaaatacgcgatcgctgttaaaaggacaattacaaacaggaatcgaatgcaaccggcgcaggaacactgccagcgcatcaacaatattttcacctgaatcaggatattcttctaatacctggaatgctgtttttccggggatcgcagtggtgagtaaccatgcatcatcaggagtacggataaaatgcttgatggtcggaagaggcataaattccgtcagccagtttagtctgaccatctcatctgtaacatcattggcaacgctacctttgccatgtttcagaaacaactctggcgcatcgggcttcccatacaagcgatagattgtcgcacctgattgcccgacattatcgcgagcccatttatacccatataaatcagcatccatgttggaatttaatcgcggcctcgacgtttcccgttgaatatggctcataacaccccttgtattactgtttatgtaagcagacagttttattgttcatgatgatatatttttatcttgtgcaatgtaacatcagagattttgagacacgggccagagctgca

SEQ ID NO: 220 - DNA, 5505 bp, synthetic construct; identical to SEQ ID NO: 106
  source 1..5505: mol_type = other DNA

SEQ ID NO: 221 - DNA, 2217 bp, synthetic construct
  source 1..2217: mol_type = other DNA
atggctgccgatggttatcttccagattggctcgaggacaacctctctgagggcattcgcgagtggtgggcgctgaaacctggagccccgaagcccaaagccaaccagcaaaagcaggacgacggccggggtctggtgcttcctggctacaagtacctcggacccttcaacggactcgacaagggggagcccgtcaacgcggcggacgcagcggccctcgagcacgacaaggcctacgaccagcagctgcaggcgggtgacaatccgtacctgcggtataaccacgccgacgccgagtttcaggagcgtctgcaagaagatacgtcttttgggggcaacctcgggcgagcagtcttccaggccaagaagcgggttctcgaacctctcggtctggttgaggaaggcgtaaagacggctcctggaaagaagagaccggtagagccatcaccccagcgttctccagactcctctacgggcatcggcaagaaaggccaacagcccgccagaaaaagactcaattttggtcagactggcgactcagagtcagttccagaccctcaacctctcggagaacctccagcagcgccctctggtgtgggacctaatacaatggctgcaggcggtggcgcaccaatggcagacaataacgaaggcgccgacggagtgggtagttcctcgggaaattggcattgcgattccacatggctgggcgacagagtcatcaccaccagcacccgaacctgggccctgcccacctacaacaaccacctctacaagcaaatctccaacgggacatcgggaggagccaccaacgacaacacctacttcggctacagcaccccctgggggtattttgactttaacagattccactgccacttttcaccacgtgactggcagcgactcatcaacaacaactggggattccggcccaagagactcagcttcaagctcttcaacatccaggtcaaggaggtcacgcagaatgaaggcaccaagaccatcgccaataacctcaccagcaccatccaggtgtttacggactcggagtaccagctgccgtacgttctcggctctgcccaccagggctgcctgcctccgttcccggcggacgtgttcatgattccccagtacggctacctaacactcaacaacggtagtcaggccgtgggacgctcctccttctactgcctggaatactttccttcgcagatgctgagaaccggcaacaacttccagtttacttacaccttcgaggacgtgcctttccacagcagctacgcccacagccagagcttggaccggctgatgaatcctctgattgaccagtacctgtactacttgtctcggactcaaacaacaggaggcacggcaaatacgcagactctgggcttcagccaaggtgggcctaatacaatggccaatcaggcaaagaactggctgccaggaccctgttaccgccaacaacgcgtctcaacgacaaccgggcaaaacaacaatagcaactttgcctggactgctgggaccaaataccatctgaatggaagaaattcattggctaatcctggcatcgctatggcaacacacaaagacgacgaggagcgtttttttcccagtaacgggatcctgatttttggcaaacaaaatgctgccagagacaatgcggattacagcgatgtcatgctcaccagcgaggaagaaatcaaaaccactaaccctgtggctacagaggaatacggtatcgtggcagataacttgcagcagcaaaacacggctcctcaaattggaactgtcaacagccagggggccttacccggtatggtctggcagaaccgggacgtgtacctgcagggtcccatctgggccaagattcctcacacggacggcaacttccacccgtctccgctgatgggcggctttggcctgaaacatcctccgcctcagatcctgatcaagaacacgcctgtacctgcggatcctccgaccaccttcaaccagtcaaagctgaactctttcatcacgcaatacagcaccggacaggtcagcgtggaaattgaatgggagctgcagaaggaaaacagcaagcgctggaaccccgagatccagtacacctccaactactacaaatctacaagtgtggactttgctgttaatacagaaggcgtgtactctgaaccccgccccattggcacccgttacctcacccgtaatctgtaa

SEQ ID NO: 222 - DNA, 4099 bp, synthetic construct
  source 1..4099: mol_type = other DNA
atgccggggttttacgagattgtgattaaggtccccagcgaccttgacgagcatctgcccggcatttctgacagctttgtgaactgggtggccgagaaggaatgggagttgccgccagattctgacatggatctgaatctgattgagcaggcacccctgaccgtggccgagaagctgcagcgcgactttctgacggaatggcgccgtgtgagtaaggccccggaggctcttttctttgtgcaatttgagaagggagagagctacttccacatgcacgtgctcgtggaaaccaccggggtgaaatccatggttttgggacgtttcctgagtcagattcgcgaaaaactgattcagagaatttaccgcgggatcgagccgactttgccaaactggttcgcggtcacaaagaccagaaatggcgccggaggcgggaacaaggtggtggatgagtgctacatccccaattacttgctccccaaaacccagcctgagctccagtgggcgtggactaatatggaacagtatttaagcgcctgtttgaatctcacggagcgtaaacggttggtggcgcagcatctgacgcacgtgtcgcagacgcaggagcagaacaaagagaatcagaatcccaattctgatgcgccggtgatcagatcaaaaacttcagccaggtacatggagctggtcgggtggctcgtggacaaggggattacctcggagaagcagtggatccaggaggaccaggcctcatacatctccttcaatgcggcctccaactcgcggtcccaaatcaaggctgccttggacaatgcgggaaagattatgagcctgactaaaaccgcccccgactacctggtgggccagcagcccgtggaggacatttccagcaatcggatttataaaattttggaactaaacgggtacgatccccaatatgcggcttccgtctttctgggatgggccacgaaaaagttcggcaagaggaacaccatctggctgtttgggcctgcaactaccgggaagaccaacatcgcggaggccatagcccacactgtgcccttctacgggtgcgtaaactggaccaatgagaactttcccttcaacgactgtgtcgacaagatggtgatctggtgggaggaggggaagatgaccgccaaggtcgtggagtcggccaaagccattctcggaggaagcaaggtgcgcgtggaccagaaatgcaagtcctcggcccagatagacccgactcccgtgatcgtcacctccaacaccaacatgtgcgccgtgattgacgggaactcaacgaccttcgaacaccagcagccgttgcaagaccggatgttcaaatttgaactcacccgccgtctggatcatgactttgggaaggtcaccaagcaggaagtcaaagactttttccggtgggcaaaggatcacgtggttgaggtggagcatgaattctacgtcaaaaagggtggagccaagaaaagacccgcccccagtgacgcagatataagtgagcccaaacgggtgcgcgagtcagttgcgcagccatcgacgtcagacgcggaagcttcgatcaactacgcagacaggtaccaaaacaaatgttctcgtcacgtgggcatgaatctgatgctgtttccctgcagacaatgcgagagaatgaatcagaattcaaatatctgcttcactcacggacagaaagactgtttagagtgctttcccgtgtcagaatctcaacccgtttctgtcgtcaaaaaggcgtatcagaaactgtgctacattcatcatatcatgggaaaggtgccagacgcttgcactgcctgcgatctggtcaatgtggatttggatgactgcatctttgaacaataaatgatttaaatcaggtatggctgccgatggttatcttccagattggctcgaggacaacctctctgagggcattcgcgagtggtgggcgctgaaacctggagccccgaagcccaaagccaaccagcaaaagcaggacgacggccggggtctggtgcttcctggctacaagtacctcggacccttcaacggactcgacaagggggagcccgtcaacgcggcggacgcagcggccctcgagcacgacaaggcctacgaccagcagctgcaggcgggtgacaatccgtacctgcggtataaccacgccgacgccgagtttcaggagcgtctgcaagaagatacgtcttttgggggcaacctcgggcgagcagtcttccaggccaagaagcgggttctcgaacctctcggtctggttgaggaaggcgtaaagacggctcctggaaagaagagaccggtagagccatcaccccagcgttctccagactcctctacgggcatcggcaagaaaggccaacagcccgccagaaaaagactcaattttggtcagactggcgactcagagtcagttccagaccctcaacctctcggagaacctccagcagcgccctctggtgtgggacctaatacaatggctgcaggcggtggcgcaccaatggcagacaataacgaaggcgccgacggagtgggtagttcctcgggaaattggcattgcgattccacatggctgggcgacagagtcatcaccaccagcacccgaacctgggccctgcccacctacaacaaccacctctacaagcaaatctccaacgggacatcgggaggagccaccaacgacaacacctacttcggctacagcaccccctgggggtattttgactttaacagattccactgccacttttcaccacgtgactggcagcgactcatcaacaacaactggggattccggcccaagagactcagcttcaagctcttcaacatccaggtcaaggaggtcacgcagaatgaaggcaccaagaccatcgccaataacctcaccagcaccatccaggtgtttacggactcggagtaccagctgccgtacgttctcggctctgcccaccagggctgcctgcctccgttcccggcggacgtgttcatgattccccagtacggctacctaacactcaacaacggtagtcaggccgtgggacgctcctccttctactgcctggaatactttccttcgcagatgctgagaaccggcaacaacttccagtttacttacaccttcgaggacgtgcctttccacagcagctacgcccacagccagagcttggaccggctgatgaatcctctgattgaccagtacctgtactacttgtctcggactcaaacaacaggaggcacggcaaatacgcagactctgggcttcagccaaggtgggcctaatacaatggccaatcaggcaaagaactggctgccaggaccctgttaccgccaacaacgcgtctcaacgacaaccgggcaaaacaacaatagcaactttgcctggactgctgggaccaaataccatctgaatggaagaaattcattggctaatcctggcatcgctatggcaacacacaaagacgacgaggagcgtttttttcccagtaacgggatcctgatttttggcaaacaaaatgctgccagagacaatgcggattacagcgatgtcatgctcaccagcgaggaagaaatcaaaaccactaaccctgtggctacagaggaatacggtatcgtggcagataacttgcagcagcaaaacacggctcctcaaattggaactgtcaacagccagggggccttacccggtatggtctggcagaaccgggacgtgtacctgcagggtcccatctgggccaagattcctcacacggacggcaacttccacccgtctccgctgatgggcggctttggcctgaaacatcctccgcctcagatcctgatcaagaacacgcctgtacctgcggatcctccgaccaccttcaaccagtcaaagctgaactctttcatcacgcaatacagcaccggacaggtcagcgtggaaattgaatgggagctgcagaaggaaaacagcaagcgctggaaccccgagatccagtacacctccaactactacaaatctacaagtgtggactttgctgttaatacagaaggcgtgtactctgaaccccgccccattggcacccgttacctcacccgtaatctgtaa

SEQ ID NO: 223 - DNA, 9825 bp, synthetic construct
  source 1..9825: mol_type = other DNA
atgccggggttttacgagattgtgattaaggtccccagcgaccttgacgagcatctgcccggcatttctgacagctttgtgaactgggtggccgagaaggaatgggagttgccgccagattctgacatggatctgaatctgattgagcaggcacccctgaccgtggccgagaagctgcagcgcgactttctgacggaatggcgccgtgtgagtaaggccccggaggctcttttctttgtgcaatttgagaagggagagagctacttccacatgcacgtgctcgtggaaaccaccggggtgaaatccatggttttgggacgtttcctgagtcagattcgcgaaaaactgattcagagaatttaccgcgggatcgagccgactttgccaaactggttcgcggtcacaaagaccagaaatggcgccggaggcgggaacaaggtggtggatgagtgctacatccccaattacttgctccccaaaacccagcctgagctccagtgggcgtggactaatatggaacagtatttaagcgcctgtttgaatctcacggagcgtaaacggttggtggcgcagcatctgacgcacgtgtcgcagacgcaggagcagaacaaagagaatcagaatcccaattctgatgcgccggtgatcagatcaaaaacttcagccaggtacatggagctggtcgggtggctcgtggacaaggggattacctcggagaagcagtggatccaggaggaccaggcctcatacatctccttcaatgcggcctccaactcgcggtcccaaatcaaggctgccttggacaatgcgggaaagattatgagcctgactaaaaccgcccccgactacctggtgggccagcagcccgtggaggacatttccagcaatcggatttataaaattttggaactaaacgggtacgatccccaatatgcggcttccgtctttctgggatgggccacgaaaaagttcggcaagaggaacaccatctggctgtttgggcctgcaactaccgggaagaccaacatcgcggaggccatagcccacactgtgcccttctacgggtgcgtaaactggaccaatgagaactttcccttcaacgactgtgtcgacaagatggtgatctggtgggaggaggggaagatgaccgccaaggtcgtggagtcggccaaagccattctcggaggaagcaaggtgcgcgtggaccagaaatgcaagtcctcggcccagatagacccgactcccgtgatcgtcacctccaacaccaacatgtgcgccgtgattgacgggaactcaacgaccttcgaacaccagcagccgttgcaagaccggatgttcaaatttgaactcacccgccgtctggatcatgactttgggaaggtcaccaagcaggaagtcaaagactttttccggtgggcaaaggatcacgtggttgaggtggagcatgaattctacgtcaaaaagggtggagccaagaaaagacccgcccccagtgacgcagatataagtgagcccaaacgggtgcgcgagtcagttgcgcagccatcgacgtcagacgcggaagcttcgatcaactacgcagacaggtaccaaaacaaatgttctcgtcacgtgggcatgaatctgatgctgtttccctgcagacaatgcgagagaatgaatcagaattcaaatatctgcttcactcacggacagaaagactgtttagagtgctttcccgtgtcagaatctcaacccgtttctgtcgtcaaaaaggcgtatcagaaactgtgctacattcatcatatcatgggaaaggtgccagacgcttgcactgcctgcgatctggtcaatgtggatttggatgactgcatctttgaacaataaatgatttaaatcaggtatggctgccgatggttatcttccagattggctcgaggacaacctctctgagggcattcgcgagtggtgggcgctgaaacctggagccccgaagcccaaagccaaccagcaaaagcaggacgacggccggggtctggtgcttcctggctacaagtacctcggacccttcaacggactcgacaagggggagcccgtcaacgcggcggacgcagcggccctcgagcacgacaaggcctacgaccagcagctgcaggcgggtgacaatccgtacctgcggtataaccacgccgacgccgagtttcaggagcgtctgcaagaagatacgtcttttgggggcaacctcgggcgagcagtcttccaggccaagaagcgggttctcgaacctctcggtctggttgaggaaggcgtaaagacggctcctggaaagaagagaccggtagagccatcaccccagcgttctccagactcctctacgggcatcggcaagaaaggccaacagcccgccagaaaaagactcaattttggtcagactggcgactcagagtcagttccagaccctcaacctctcggagaacctccagcagcgccctctggtgtgggacctaatacaatggctgcaggcggtggcgcaccaatggcagacaataacgaaggcgccgacggagtgggtagttcctcgggaaattggcattgcgattccacatggctgggcgacagagtcatcaccaccagcacccgaacctgggccctgcccacctacaacaaccacctctacaagcaaatctccaacgggacatcgggaggagccaccaacgacaacacctacttcggctacagcaccccctgggggtattttgactttaacagattccactgccacttttcaccacgtgactggcagcgactcatcaacaacaactggggattccggcccaagagactcagcttcaagctcttcaacatccaggtcaaggaggtcacgcagaatgaaggcaccaagaccatcgccaataacctcaccagcaccatccaggtgtttacggactcggagtaccagctgccgtacgttctcggctctgcccaccagggctgcctgcctccgttcccggcggacgtgttcatgattccccagtacggctacctaacactcaacaacggtagtcaggccgtgggacgctcctccttctactgcctggaatactttccttcgcagatgctgagaaccggcaacaacttccagtttacttacaccttcgaggacgtgcctttccacagcagctacgcccacagccagagcttggaccggctgatgaatcctctgattgaccagtacctgtactacttgtctcggactcaaacaacaggaggcacggcaaatacgcagactctgggcttcagccaaggtgggcctaatacaatggccaatcaggcaaagaactggctgccaggaccctgttaccgccaacaacgcgtctcaacgacaaccgggcaaaacaacaatagcaactttgcctggactgctgggaccaaataccatctgaatggaagaaattcattggctaatcctggcatcgctatggcaacacacaaagacgacgaggagcgtttttttcccagtaacgggatcctgatttttggcaaacaaaatgctgccagagacaatgcggattacagcgatgtcatgctcaccagcgaggaagaaatcaaaaccactaaccctgtggctacagaggaatacggtatcgtggcagataacttgcagcagcaaaacacggctcctcaaattggaactgtcaacagccagggggccttacccggtatggtctggcagaaccgggacgtgtacctgcagggtcccatctgggccaagattcctcacacggacggcaacttccacccgtctccgctgatgggcggctttggcctgaaacatcctccgcctcagatcctgatcaagaacacgcctgtacctgcggatcctccgaccaccttcaaccagtcaaagctgaactctttcatcacgcaatacagcaccggacaggtcagcgtggaaattgaatgggagctgcagaaggaaaacagcaagcgctggaaccccgagatccagtacacctccaactactacaaatctacaagtgtggactttgctgttaatacagaaggcgtgtactctgaaccccgccccattggcacccgttacctcacccgtaatctgtaattgcctgttaatcaataaaccggttgattcgtttcagttgaactttggtctctgcgaagggcgaattcgtttaaacctgcaggactagagccgaattctgcatcgcgatagggataacagggtaataaataatgtactagagacactttcaataaaggcaaatgcttttatttgtacactctcgggtgattatttacccccacccttgccgtctgcgccgttcagaagtcgaaggggttctgtctggcatcggaatgggccacgggcagagacacgttccggtactggtgcttggtggaccacttgaactcaggcacgaccattctaggcagctctgtgaagttctcgctccacaggctccgcaccatcaccagggcgttcagcaggtcaggggcgctgattttgaagtcgcagttaggtccgccgccctgggctctgctgtttctgtacacagggttgcagcactggaacacaataagagcagggtggtgcacgctggccagcacagacttgtcgctgatcaggtcggcgtcgagatcctcggcgttagacaaggcaaaaggggtcagcttgggcagctggcggcccaggaaaggggcgtggccgggcttgctattgcactcgcatctcagaggcatcagcaggtggccgtggccggtctgggcgttggggtacagggcctgcataaaggccttgatctgtttgaaggccacttgggccttggcgccttcggagaagaacatgccgcagcttttgccgctgaactggttggcggggcaggcggcgtcgtgcacacaacaccgggcgtcggtattgctgatctgcaccacgtttctgccccatctgttcttcacgatcttggccttgctgctctgctctttcagggccctctggccgttctcagaggtgacgtccatctcgatcacatgttccttgttgatcatgatgctgccgtgcagacacttcagctcgccctcgatttccgcgcatctgtgcagccacagggcacaaccggtaggctcgtggtgcttgtatgtcacctcagcaaaagattgcaggtaggcttgcaggaatctgcccatcatggtcacgaaggtcttgttggaggtaaaagtcagctgcagtcctctgtgttcctcgttcagccatgtcttgcacacggcggccagagcctcgacctgatctggcagcagcttgaaattagccttcaggtcgttgtccacgtgatacttatccatcagtgctctggcggcttccatgcccttctcccaggcggaaacgatgggcacgctcagggggttcatcacggtgatctcgctttcagcttctgaaggttcctcctcttcctcctgtgttctcatgccccgagccacggggtcgtcctcattcagtctccgcacggttctttttcctccctttccgtgcttaatcagtacaggaggattagagaagcccaccatctggagggcgacgtcctccctttcttcttcgctatccacgatcacttctgggctggggggccgttcaggctttgggctaggccgtttttttttcttcttaggggcgatagccagatcagcggcgcttgtagagggccgaggactaggggttctaggcacgagggcgtcctggctgctgtcctcctcatcctcgctctcgatccgtctccgcattctcttcttagggggggcccgcggagggggagggctagggctaggggacgacacatcttccatggttggaggtctgcgagcagcgcctctgcctctctctggtgttgtctcgcgctgttcttcctctctagaggccatttccttctcctataggcagaaaaagatcgttgaaactcactccggggctgtggacgtcggcttaccttcgcaaatttgtacctgaggactaccacgcccacgagattaggttctacgaagaccaatcccgcccgcctaatgcggagcttaccgcctgcgtcattacccagggccacattcttggccaattgcaagccatcaacaaagcccgccaagagtttctgctacgaaagggacggggggtttacttggacccccagtccggcgaggagctcaacccaatccccccgccgccgcagccctatcagcagcagccgcgggcccttgcttcccaggatggcacccaaaaagaagctgcagctgccgccgccacccacggacgaggaggaatactgggacagtcaggcagaggaggttttggacgaggaggaggaggacatgatggaagactgggagagcctagacgaggaagcttccgaggtcgaagaggtgtcagacgaaacaccgtcaccctcggtcgcattcccctcgccggcgccccagaaatcggcaaccggttccagcatggctacaacctccgctcctcaggcgccgccggcactgcccgttcgccgacccaaccgtagatgggacaccactggaaccagggccggtaagtccaagcagccgccgccgttagcccaagagcaacaacagcgccaaggctaccgctcatggcgcgggcacaagaacgccatagttgcttgcttgcaagactgtgggggcaacatctccttcgcccgccgctttcttctctaccatcacggcgtggccttcccccgtaacatcctgcattactaccgtcatctctacagcccatactgcaccggcggcagcggcagcaacagcagcggccacacagaagcaaaggcgaccggatagcaagactctgacaaagcccaagaaatccacagcggcggcagcagcaggaggaggagcgctgcgtctggcgcccaacgaacccgtatcgacccgcgagcttagaaacaggatttttcccactctgtatgctatatttcaacagagcaggggccaagaacaagagctgaaaataaaaaacaggtctctgcgatccctcacccgcagctgcctgtatcacaaaagcgaagatcagcttcggcgcacgctggaagacgcggaggctctcttcagtaaatactgcgcgctgactcttaaggactagtttcgcgccctttctcaaatttaagcgcgaaaactacgtcatctccagcggccacacccggcgccagcacctgttgtcagcgccattttttagggcggagtaacttgtatgtgttgggaattgtagttttcttaaaatgggaagtgacgtaacgtgggaaaacggaagtgacgatttgaggaagttgtgggttttttggctttcgtttctgggcgtaggttcgcgtgcggttttctgggtgttttttgtggactttaaccgttacgtcattttttagtcctatatatactcgctctgcacttggcccttttttacactgtgactgattgagctggtgccgtgtcgagtggtgtttttttaataggttttcttttttactggtaaggctgactgttatgactacgtccggcgttccatttggcatgacactacgaccaacacgatctcggttgtctcggcgcactccgtacagtagggatcgtctacctccttttgagacagaaacccgcgctaccatactggaggatcatccgctgctgcccgaatgtaacactttgacaatgcacaacgtgagttacgtgcgaggtcttccctgcagtgtgggatttacgctgattcaggaatgggttgttccctgggatatggttctaacgcgggaggagcttgtaatcctgaggaagtgtatgcacgtgtgcctgtgttgtgccaacattgatatcatgacgagcatgatgatccatggttacgagtcctgggctctccactgtcattgttccagtcccggttccctgcagtgtatagccggcgggcaggttttggccagctggtttaggatggtggtggatggcgccatgtttaatcagaggtttatatggtaccgggaggtggtgaattacaacatgccaaaagaggtaatgtttatgtccagcgtgtttatgaggggtcgccacttaatctacctgcgcttgtggtatgatggccacgtgggttctgtggtccccgccatgagctttggatacagcgccttgcactgtgggattttgaacaatattgtggtgctgtgctgcagttactgtgctgatttaagtgagatcagggtgcgctgctgtgcccggaggacaaggcgccttatgctgcgggcggtgcgaatcatcgctgaggagaccactgccatgttgtattcctgcaggacggagcggcggcggcagcagtttattcgcgcgctgctgcagcaccaccgccctatcctgatgcacgattatgactctacccccatgtaggcgtggacttctccttcgccgcccgttaagcaaccgcaagttggacagcagcctgtggctcagcagctggacagcgacatgaacttaagtgagctgcccggggagtttattaatatcactgatgagcgtttggctcgacaggaaaccgtgtggaatataacacctaagaatatgtctgttacccatgatatgatgctttttaaggccagccggggagaaaggactgtgtactctgtgtgttgggagggaggtggcaggttgaatactagggttctgtgagtttgattaaggtacggtgatctgtataagctatgtggtggtggggctatactactgaatgaaaaatgacttgaaattttctgcaattgaaaaataaacacgttgaaacataacacaaacgattctttattcttgggcaatgtatgaaaaagtgtaagaggatgtggcaaatatttcattaatgtagttgtggccagaccagtcccatgaaaatgacatagagtatgcacttggagttgtgtctcctgtttcctgtgtaccgtttagtgtaatggttagtgttacaggtttagttttgtctccgtttaagtaaacttgactgacaatgttacttttggcagttttaccgtgagattttggataagctgataggttaggcataaatccaacagcgtttgtataggctgtcgcccctcctgacgcggtaggaggaggggagggtgccctgcatgtctgccgctgctcttgctcttgccgctgctgaggaggggggcgcatctgccgcagcaccggatgcatctgggaaaagcaaaaaaggggctcgtccctgtttccggaggaatttgcaagcggggtcttgcatgacggggaggcaaacccccgttcgccgcagtccggccggtccgagactcgaaccgggggtcccgcgactcaacccttggaaaataaccctccggctacagggagcgagccacttaatgctttcgctttccagcctaaccgcttacgctgcgcgcggccagtggccaaaaaagctagcgcagcagccgccgcgcctggaaggaagccaaaaggagcactcccccgttgtctgacgtcgcacacctgggttcgacacgcgggcggtaaccgcatggatcacggcggacggccggatacggggctcgaaccccggtcgtccgccatgatacccttgcgaatttatccaccagaccacggaagagtgcccgcttacaggctctccttttgcacggtctagagcgtcaacgattgcgcgcgcctgaccggccagagcgtcccgaccatggagcactttttgccgctgcgcaacatctggaaccgcgtccgcgactttccgcgcgcctccaccaccgccgccggcatcacctggatgtccaggtacatctacggata

SEQ ID NO: 224 - DNA, 12588 bp, synthetic construct
  source 1..12588: mol_type = other DNA
tcgcgcgtttcggtgatgacggtgaaaacctctgacacatgcagctcccggagacggtcacagcttgtctgtaagcggatgccgggagcagacaagcccgtcagggcgcgtcagcgggtgttggcgggtgtcggggctggcttaactatgcggcatcagagcagattgtactgagagtgcaccatatgcggtgtgaaataccgcacagatgcgtaaggagaaaataccgcatcaggcgccattcgccattcaggctgcgcaactgttgggaagggcgatcggtgcgggcctcttcgctattacgccagctggcgaaagggggatgtgctgcaaggcgattaagttgggtaacgccagggttttcccagtcacgacgttgtaaaacgacggccagagaattccgcagggtctccattttgaagcgggaggtttgaacgcgcagccgccatgccggggttttacgagattgtgattaaggtccccagcgaccttgacgagcatctgcccggcatttctgacagctttgtgaactgggtggccgagaaggaatgggagttgccgccagattctgacatggatctgaatctgattgagcaggcacccctgaccgtggccgagaagctgcagcgcgactttctgacggaatggcgccgtgtgagtaaggccccggaggctcttttctttgtgcaatttgagaagggagagagctacttccacatgcacgtgctcgtggaaaccaccggggtgaaatccatggttttgggacgtttcctgagtcagattcgcgaaaaactgattcagagaatttaccgcgggatcgagccgactttgccaaactggttcgcggtcacaaagaccagaaatggcgccggaggcgggaacaaggtggtggatgagtgctacatccccaattacttgctccccaaaacccagcctgagctccagtgggcgtggactaatatggaacagtatttaagcgcctgtttgaatctcacggagcgtaaacggttggtggcgcagcatctgacgcacgtgtcgcagacgcaggagcagaacaaagagaatcagaatcccaattctgatgcgccggtgatcagatcaaaaacttcagccaggtacatggagctggtcgggtggctcgtggacaaggggattacctcggagaagcagtggatccaggaggaccaggcctcatacatctccttcaatgcggcctccaactcgcggtcccaaatcaaggctgccttggacaatgcgggaaagattatgagcctgactaaaaccgcccccgactacctggtgggccagcagcccgtggaggacatttccagcaatcggatttataaaattttggaactaaacgggtacgatccccaatatgcggcttccgtctttctgggatgggccacgaaaaagttcggcaagaggaacaccatctggctgtttgggcctgcaactaccgggaagaccaacatcgcggaggccatagcccacactgtgcccttctacgggtgcgtaaactggaccaatgagaactttcccttcaacgactgtgtcgacaagatggtgatctggtgggaggaggggaagatgaccgccaaggtcgtggagtcggccaaagccattctcggaggaagcaaggtgcgcgtggaccagaaatgcaagtcctcggcccagatagacccgactcccgtgatcgtcacctccaacaccaacatgtgcgccgtgattgacgggaactcaacgaccttcgaacaccagcagccgttgcaagaccggatgttcaaatttgaactcacccgccgtctggatcatgactttgggaaggtcaccaagcaggaagtcaaagactttttccggtgggcaaaggatcacgtggttgaggtggagcatgaattctacgtcaaaaagggtggagccaagaaaagacccgcccccagtgacgcagatataagtgagcccaaacgggtgcgcgagtcagttgcgcagccatcgacgtcagacgcggaagcttcgatcaactacgcagacaggtaccaaaacaaatgttctcgtcacgtgggcatgaatctgatgctgtttccctgcagacaatgcgagagaatgaatcagaattcaaatatctgcttcactcacggacagaaagactgtttagagtgctttcccgtgtcagaatctcaacccgtttctgtcgtcaaaaaggcgtatcagaaactgtgctacattcatcatatcatgggaaaggtgccagacgcttgcactgcctgcgatctggtcaatgtggatttggatgactgcatctttgaacaataaatgatttaaatcaggtatggctgccgatggttatcttccagattggctcgaggacaacctctctgagggcattcgcgagtggtgggcgctgaaacctggagccccgaagcccaaagccaaccagcaaaagcaggacgacggccggggtctggtgcttcctggctacaagtacctcggacccttcaacggactcgacaagggggagcccgtcaacgcggcggacgcagcggccctcgagcacgacaaggcctacgaccagcagctgcaggcgggtgacaatccgtacctgcggtataaccacgccgacgccgagtttcaggagcgtctgcaagaagatacgtcttttgggggcaacctcgggcgagcagtcttccaggccaagaagcgggttctcgaacctctcggtctggttgaggaaggcgtaaagacggctcctggaaagaagagaccggtagagccatcaccccagcgttctccagactcctctacgggcatcggcaagaaaggccaacagcccgccagaaaaagactcaattttggtcagactggcgactcagagtcagttccagaccctcaacctctcggagaacctccagcagcgccctctggtgtgggacctaatacaatggctgcaggcggtggcgcaccaatggcagacaataacgaaggcgccgacggagtgggtagttcctcgggaaattggcattgcgattccacatggctgggcgacagagtcatcaccaccagcacccgaacctgggccctgcccacctacaacaaccacctctacaagcaaatctccaacgggacatcgggaggagccaccaacgacaacacctacttcggctacagcaccccctgggggtattttgactttaacagattccactgccacttttcaccacgtgactggcagcgactcatcaacaacaactggggattccggcccaagagactcagcttcaagctcttcaacatccaggtcaaggaggtcacgcagaatgaaggcaccaagaccatcgccaataacctcaccagcaccatccaggtgtttacggactcggagtaccagctgccgtacgttctcggctctgcccaccagggctgcctgcctccgttcccggcggacgtgttcatgattccccagtacggctacctaacactcaacaacggtagtcaggccgtgggacgctcctccttctactgcctggaatactttccttcgcagatgctgagaaccggcaacaacttccagtttacttacaccttcgaggacgtgcctttccacagcagctacgcccacagccagagcttggaccggctgatgaatcctctgattgaccagtacctgtactacttgtctcggactcaaacaacaggaggcacggcaaatacgcagactctgggcttcagccaaggtgggcctaatacaatggccaatcaggcaaagaactggctgccaggaccctgttaccgccaacaacgcgtctcaacgacaaccgggcaaaacaacaatagcaactttgcctggactgctgggaccaaataccatctgaatggaagaaattcattggctaatcctggcatcgctatggcaacacacaaagacgacgaggagcgtttttttcccagtaacgggatcctgatttttggcaaacaaaatgctgccagagacaatgcggattacagcgatgtcatgctcaccagcgaggaagaaatcaaaaccactaaccctgtggctacagaggaatacggtatcgtggcagataacttgcagcagcaaaacacggctcctcaaattggaactgtcaacagccagggggccttacccggtatggtctggcagaaccgggacgtgtacctgcagggtcccatctgggccaagattcctcacacggacggcaacttccacccgtctccgctgatgggcggctttggcctgaaacatcctccgcctcagatcctgatcaagaacacgcctgtacctgcggatcctccgaccaccttcaaccagtcaaagctgaactctttcatcacgcaatacagcaccggacaggtcagcgtggaaattgaatgggagctgcagaaggaaaacagcaagcgctggaaccccgagatccagtacacctccaactactacaaatctacaagtgtggactttgctgttaatacagaaggcgtgtactctgaaccccgccccattggcacccgttacctcacccgtaatctgtaattgcctgttaatcaataaaccggttgattcgtttcagttgaactttggtctctgcgaagggcgaattcgtttaaacctgcaggactagagccgaattctgcatcgcgatagggataacagggtaataaataatgtactagagacactttcaataaaggcaaatgcttttatttgtacactctcgggtgattatttacccccacccttgccgtctgcgccgttcagaagtcgaaggggttctgtctggcatcggaatgggccacgggcagagacacgttccggtactggtgcttggtggaccacttgaactcaggcacgaccattctaggcagctctgtgaagttctcgctccacaggctccgcaccatcaccagggcgttcagcaggtcaggggcgctgattttgaagtcgcagttaggtccgccgccctgggctctgctgtttctgtacacagggttgcagcactggaacacaataagagcagggtggtgcacgctggccagcacagacttgtcgctgatcaggtcggcgtcgagatcctcggcgttagacaaggcaaaaggggtcagcttgggcagctggcggcccaggaaaggggcgtggccgggcttgctattgcactcgcatctcagaggcatcagcaggtggccgtggccggtctgggcgttggggtacagggcctgcataaaggccttgatctgtttgaaggccacttgggccttggcgccttcggagaagaacatgccgcagcttttgccgctgaactggttggcggggcaggcggcgtcgtgcacacaacaccgggcgtcggtattgctgatctgcaccacgtttctgccccatctgttcttcacgatcttggccttgctgctctgctctttcagggccctctggccgttctcagaggtgacgtccatctcgatcacatgttccttgttgatcatgatgctgccgtgcagacacttcagctcgccctcgatttccgcgcatctgtgcagccacagggcacaaccggtaggctcgtggtgcttgtatgtcacctcagcaaaagattgcaggtaggcttgcaggaatctgcccatcatggtcacgaaggtcttgttggaggtaaaagtcagctgcagtcctctgtgttcctcgttcagccatgtcttgcacacggcggccagagcctcgacctgatctggcagcagcttgaaattagccttcaggtcgttgtccacgtgatacttatccatcagtgctctggcggcttccatgcccttctcccaggcggaaacgatgggcacgctcagggggttcatcacggtgatctcgctttcagcttctgaaggttcctcctcttcctcctgtgttctcatgccccgagccacggggtcgtcctcattcagtctccgcacggttctttttcctccctttccgtgcttaatcagtacaggaggattagagaagcccaccatctggagggcgacgtcctccctttcttcttcgctatccacgatcacttctgggctggggggccgttcaggctttgggctaggccgtttttttttcttcttaggggcgatagccagatcagcggcgcttgtagagggccgaggactaggggttctaggcacgagggcgtcctggctgctgtcctcctcatcctcgctctcgatccgtctccgcattctcttcttagggggggcccgcggagggggagggctagggctaggggacgacacatcttccatggttggaggtctgcgagcagcgcctctgcctctctctggtgttgtctcgcgctgttcttcctctctagaggccatttccttctcctataggcagaaaaagatcgttgaaactcactccggggctgtggacgtcggcttaccttcgcaaatttgtacctgaggactaccacgcccacgagattaggttctacgaagaccaatcccgcccgcctaatgcggagcttaccgcctgcgtcattacccagggccacattcttggccaattgcaagccatcaacaaagcccgccaagagtttctgctacgaaagggacggggggtttacttggacccccagtccggcgaggagctcaacccaatccccccgccgccgcagccctatcagcagcagccgcgggcccttgcttcccaggatggcacccaaaaagaagctgcagctgccgccgccacccacggacgaggaggaatactgggacagtcaggcagaggaggttttggacgaggaggaggaggacatgatggaagactgggagagcctagacgaggaagcttccgaggtcgaagaggtgtcagacgaaacaccgtcaccctcggtcgcattcccctcgccggcgccccagaaatcggcaaccggttccagcatggctacaacctccgctcctcaggcgccgccggcactgcccgttcgccgacccaaccgtagatgggacaccactggaaccagggccggtaagtccaagcagccgccgccgttagcccaagagcaacaacagcgccaaggctaccgctcatggcgcgggcacaagaacgccatagttgcttgcttgcaagactgtgggggcaacatctccttcgcccgccgctttcttctctaccatcacggcgtggccttcccccgtaacatcctgcattactaccgtcatctctacagcccatactgcaccggcggcagcggcagcaacagcagcggccacacagaagcaaaggcgaccggatagcaagactctgacaaagcccaagaaatccacagcggcggcagcagcaggaggaggagcgctgcgtctggcgcccaacgaacccgtatcgacccgcgagcttagaaacaggatttttcccactctgtatgctatatttcaacagagcaggggccaagaacaagagctgaaaataaaaaacaggtctctgcgatccctcacccgcagctgcctgtatcacaaaagcgaagatcagcttcggcgcacgctggaagacgcggaggctctcttcagtaaatactgcgcgctgactcttaaggactagtttcgcgccctttctcaaatttaagcgcgaaaactacgtcatctccagcggccacacccggcgccagcacctgttgtcagcgccattttttagggcggagtaacttgtatgtgttgggaattgtagttttcttaaaatgggaagtgacgtaacgtgggaaaacggaagtgacgatttgaggaagttgtgggttttttggctttcgtttctgggcgtaggttcgcgtgcggttttctgggtgttttttgtggactttaaccgttacgtcattttttagtcctatatatactcgctctgcacttggcccttttttacactgtgactgattgagctggtgccgtgtcgagtggtgtttttttaataggttttcttttttactggtaaggctgactgttatgactacgtccggcgttccatttggcatgacactacgaccaacacgatctcggttgtctcggcgcactccgtacagtagggatcgtctacctccttttgagacagaaacccgcgctaccatactggaggatcatccgctgctgcccgaatgtaacactttgacaatgcacaacgtgagttacgtgcgaggtcttccctgcagtgtgggatttacgctgattcaggaatgggttgttccctgggatatggttctaacgcgggaggagcttgtaatcctgaggaagtgtatgcacgtgtgcctgtgttgtgccaacattgatatcatgacgagcatgatgatccatggttacgagtcctgggctctccactgtcattgttccagtcccggttccctgcagtgtatagccggcgggcaggttttggccagctggtttaggatggtggtggatggcgccatgtttaatcagaggtttatatggtaccgggaggtggtgaattacaacatgccaaaagaggtaatgtttatgtccagcgtgtttatgaggggtcgccacttaatctacctgcgcttgtggtatgatggccacgtgggttctgtggtccccgccatgagctttggatacagcgccttgcactgtgggattttgaacaatattgtggtgctgtgctgcagttactgtgctgatttaagtgagatcagggtgcgctgctgtgcccggaggacaaggcgccttatgctgcgggcggtgcgaatcatcgctgaggagaccactgccatgttgtattcctgcaggacggagcggcggcggcagcagtttattcgcgcgctgctgcagcaccaccgccctatcctgatgcacgattatgactctacccccatgtaggcgtggacttctccttcgccgcccgttaagcaaccgcaagttggacagcagcctgtggctcagcagctggacagcgacatgaacttaagtgagctgcccggggagtttattaatatcactgatgagcgtttggctcgacaggaaaccgtgtggaatataacacctaagaatatgtctgttacccatgatatgatgctttttaaggccagccggggagaaaggactgtgtactctgtgtgttgggagggaggtggcaggttgaatactagggttctgtgagtttgattaaggtacggtgatctgtataagctatgtggtggtggggctatactactgaatgaaaaatgacttgaaattttctgcaattgaaaaataaacacgttgaaacataacacaaacgattctttattcttgggcaatgtatgaaaaagtgtaagaggatgtggcaaatatttcattaatgtagttgtggccagaccagtcccatgaaaatgacatagagtatgcacttggagttgtgtctcctgtttcctgtgtaccgtttagtgtaatggttagtgttacaggtttagttttgtctccgtttaagtaaacttgactgacaatgttacttttggcagttttaccgtgagattttggataagctgataggttaggcataaatccaacagcgtttgtataggctgtcgcccctcctgacgcggtaggaggaggggagggtgccctgcatgtctgccgctgctcttgctcttgccgctgctgaggaggggggcgcatctgccgcagcaccggatgcatctgggaaaagcaaaaaaggggctcgtccctgtttccggaggaatttgcaagcggggtcttgcatgacggggaggcaaacccccgttcgccgcagtccggccggtccgagactcgaaccgggggtcccgcgactcaacccttggaaaataaccctccggctacagggagcgagccacttaatgctttcgctttccagcctaaccgcttacgctgcgcgcggccagtggccaaaaaagctagcgcagcagccgccgcgcctggaaggaagccaaaaggagcactcccccgttgtctgacgtcgcacacctgggttcgacacgcgggcggtaaccgcatggatcacggcggacggccggatacggggctcgaaccccggtcgtccgccatgatacccttgcgaatttatccaccagaccacggaagagtgcccgcttacaggctctccttttgcacggtctagagcgtcaacgattgcgcgcgcctgaccggccagagcgtcccgaccatggagcactttttgccgctgcgcaacatctggaaccgcgtccgcgactttccgcgcgcctccaccaccgccgccggcatcacctggatgtccaggtacatctacggatatggcaaacagctattatgggtattatgggtgcggccgcggatcccgggcccgtcgactgcagaggcctgcatgcaagcttggtgtaatcatggtcatagctgtttcctgtgtgaaattgttatccgctcacaattccacacaacatacgagccggaagcataaagtgtaaagcctggggtgcctaatgagtgagctaactcacattaattgcgttgcgctcactgcccgctttccagtcgggaaacctgtcgtgccagctgcattaatgaatcggccaacgcgcggggagaggcggtttgcgtattgggcgctcttccgcttcctcgctcactgactcgctgcgctcggtcgttcggctgcggcgagcggtatcagctcactcaaaggcggtaatacggttatccacagaatcaggggataacgcaggaaagaacatgtgagcaaaaggccagcaaaaggccaggaaccgtaaaaaggccgcgttgctggcgtttttccataggctccgcccccctgacgagcatcacaaaaatcgacgctcaagtcagaggtggcgaaacccgacaggactataaagataccaggcgtttccccctggaagctccctcgtgcgctctcctgttccgaccctgccgcttaccggatacctgtccgcctttctcccttcgggaagcgtggcgctttctcatagctcacgctgtaggtatctcagttcggtgtaggtcgttcgctccaagctgggctgtgtgcacgaaccccccgttcagcccgaccgctgcgccttatccggtaactatcgtcttgagtccaacccggtaagacacgacttatcgccactggcagcagccactggtaacaggattagcagagcgaggtatgtaggcggtgctacagagttcttgaagtggtggcctaactacggctacactagaagaacagtatttggtatctgcgctctgctgaagccagttaccttcggaaaaagagttggtagctcttgatccggcaaacaaaccaccgctggtagcggtggtttttttgtttgcaagcagcagattacgcgcagaaaaaaaggatctcaagaagatcctttgatcttttctacggggtctgacgctcagtggaacgaaaactcacgttaagggattttggtcatgagattatcaaaaaggatcttcacctagaaggtcctgtattagaggtcacgtgagtgttttgcgacattttgcgacaccatgtggtcacgctgggtatttaagcccgagtgagcacgcagggtctccattttgaagcgggaggtttgaacgcgcagccgccatccttttaaattaaaaatgaagttttaaatcaagcccaatctgaataatgttacaaccaattaaccaattctgattagaaaaactcatcgagcatcaaatgaaactgcaatttattcatatcaggattatcaataccatatttttgaaaaagccgtttctgtaatgaaggagaaaactcaccgaggcagttccataggatggcaagatcctggtatcggtctgcgattccgactcgtccaacatcaatacaacctattaatttcccctcgtcaaaaataaggttatcaagtgagaaatcaccatgagtgacgactgaatccggtgagaatggcaaaagtttatgcatttctttccagacttgttcaacaggccagccattacgctcgtcatcaaaatcactcgcatcaaccaaaccgttattcattcgtgattgcgcctgagcgagacgaaatacgcgatcgctgttaaaaggacaattacaaacaggaatcgaatgcaaccggcgcaggaacactgccagcgcatcaacaatattttcacctgaatcaggatattcttctaatacctggaatgctgtttttccggggatcgcagtggtgagtaaccatgcatcatcaggagtacggataaaatgcttgatggtcggaagaggcataaattccgtcagccagtttagtctgaccatctcatctgtaacatcattggcaacgctacctttgccatgtttcagaaacaactctggcgcatcgggcttcccatacaagcgatagattgtcgcacctgattgcccgacattatcgcgagcccatttatacccatataaatcagcatccatgttggaatttaatcgcggcctcgacgtttcccgttgaatatggctcataacaccccttgtattactgtttatgtaagcagacagttttattgttcatgatgatatatttttatcttgtgcaatgtaacatcagagattttgagacacgggccagagctgca

SEQ ID NO: 225 - DNA, 5505 bp, synthetic construct; identical to SEQ ID NO: 106
  source 1..5505: mol_type = other DNA

SEQ ID NO: 226 - DNA, 2208 bp, synthetic construct
  source 1..2208: mol_type = other DNA
atggctgccgatggttatcttccagattggctcgaggacaaccttagtgaaggaattcgcgagtggtgggctttgaaacctggagcccctcaacccaaggcaaatcaacaacatcaagacaacgctcgaggtcttgtgcttccgggttacaaataccttggacccggcaacggactcgacaagggggagccggtgaacgcagcagacgcggcggccctcgagcacgacaaggcctacgaccagcagctcaaggccggagacaacccgtacctcaagtacaaccacgccgacgccgagttccaggagcggctcaaagaagatacgtcttttgggggcaacctcgggcgagcagtcttccaggccaaaaagaggcttcttgaacctcttggtctggttgaggaagcggctaagacggctcctggaaagaagaggcctgtagagcagtctcctcaggaaccggactcctccgcgggtattggcaaatcgggtgcacagcccgctaaaaagagactcaatttcggtcagactggcgacacagagtcagtcccagaccctcaaccaatcggagaacctcccgcagccccctcaggtgtgggatctcttacaatggcttcaggtggtggcgcaccagtggcagacaataacgaaggtgccgatggagtgggtagttcctcgggaaattggcattgcgattcccaatggctgggggacagagtcatcaccaccagcacccgaacctgggccctgcccacctacaacaatcacctctacaagcaaatctccaacagcacatctggaggatcttcaaatgacaacgcctacttcggctacagcaccccctgggggtattttgacttcaacagattccactgccacttctcaccacgtgactggcagcgactcatcaacaacaactggggattccggcctaagcgactcaacttcaagctcttcaacattcaggtcaaagaggttacggacaacaatggagtcaagaccatcgccaataaccttaccagcacggtccaggtcttcacggactcagactatcagctcccgtacgtgctcgggtcggctcacgagggctgcctcccgccgttcccagcggacgttttcatgattcctcagtacgggtatctgacgcttaatgatggaagccaggccgtgggtcgttcgtccttttactgcctggaatatttcccgtcgcaaatgctaagaacgggtaacaacttccagttcagctacgagtttgagaacgtacctttccatagcagctacgctcacagccaaagcctggaccgactaatgaatccactcatcgaccaatacttgtactatctctcaaagactattaacggttctggacagaatcaacaaacgctaaaattcagtgtggccggacccagcaacatggctgtccagggaagaaactacatacctggacccagctaccgacaacaacgtgtctcaaccactgtgactcaaaacaacaacagcgaatttgcttggcctggagcttcttcttgggctctcaatggacgtaatagcttgatgaatcctggacctgctatggccagccacaaagaaggagaggaccgtttctttcctttgtctggatctttaatttttggcaaacaaggaactggaagagacaacgtggatgcggacaaagtcatgataaccaacgaagaagaaattaaaactactaacccggtagcaacggagtcctatggacaagtggccacaaaccaccagagtgcccaagcacaggcgcagaccggctgggttcaaaaccaaggaatacttccgggtatggtttggcaggacagagatgtgtacctgcaaggacccatttgggccaaaattcctcacacggacggcaactttcacccttctccgctgatgggagggtttggaatgaagcacccgcctcctcagatcctcatcaaaaacacacctgtacctgcggatcctccaacggccttcaacaaggacaagctgaactctttcatcacccagtattctactggccaagtcagcgtggagatcgagtgggagctgcagaaggaaaacagcaagcgctggaacccggagatccagtacacttccaactattacaagtctaataatgttgaatttgctgttaatactgaaggtgtatatagtgaaccccgccccattggcaccagatacctgactcgtaatctg

SEQ ID NO: 227 - DNA, 4090 bp, synthetic construct
  source 1..4090: mol_type = other DNA
atgccggggttttacgagattgtgattaaggtccccagcgaccttgacgagcatctgcccggcatttctgacagctttgtgaactgggtggccgagaaggaatgggagttgccgccagattctgacatggatctgaatctgattgagcaggcacccctgaccgtggccgagaagctgcagcgcgactttctgacggaatggcgccgtgtgagtaaggccccggaggctcttttctttgtgcaatttgagaagggagagagctacttccacatgcacgtgctcgtggaaaccaccggggtgaaatccatggttttgggacgtttcctgagtcagattcgcgaaaaactgattcagagaatttaccgcgggatcgagccgactttgccaaactggttcgcggtcacaaagaccagaaatggcgccggaggcgggaacaaggtggtggatgagtgctacatccccaattacttgctccccaaaacccagcctgagctccagtgggcgtggactaatatggaacagtatttaagcgcctgtttgaatctcacggagcgtaaacggttggtggcgcagcatctgacgcacgtgtcgcagacgcaggagcagaacaaagagaatcagaatcccaattctgatgcgccggtgatcagatcaaaaacttcagccaggtacatggagctggtcgggtggctcgtggacaaggggattacctcggagaagcagtggatccaggaggaccaggcctcatacatctccttcaatgcggcctccaactcgcggtcccaaatcaaggctgccttggacaatgcgggaaagattatgagcctgactaaaaccgcccccgactacctggtgggccagcagcccgtggaggacatttccagcaatcggatttataaaattttggaactaaacgggtacgatccccaatatgcggcttccgtctttctgggatgggccacgaaaaagttcggcaagaggaacaccatctggctgtttgggcctgcaactaccgggaagaccaacatcgcggaggccatagcccacactgtgcccttctacgggtgcgtaaactggaccaatgagaactttcccttcaacgactgtgtcgacaagatggtgatctggtgggaggaggggaagatgaccgccaaggtcgtggagtcggccaaagccattctcggaggaagcaaggtgcgcgtggaccagaaatgcaagtcctcggcccagatagacccgactcccgtgatcgtcacctccaacaccaacatgtgcgccgtgattgacgggaactcaacgaccttcgaacaccagcagccgttgcaagaccggatgttcaaatttgaactcacccgccgtctggatcatgactttgggaaggtcaccaagcaggaagtcaaagactttttccggtgggcaaaggatcacgtggttgaggtggagcatgaattctacgtcaaaaagggtggagccaagaaaagacccgcccccagtgacgcagatataagtgagcccaaacgggtgcgcgagtcagttgcgcagccatcgacgtcagacgcggaagcttcgatcaactacgcagacaggtaccaaaacaaatgttctcgtcacgtgggcatgaatctgatgctgtttccctgcagacaatgcgagagaatgaatcagaattcaaatatctgcttcactcacggacagaaagactgtttagagtgctttcccgtgtcagaatctcaacccgtttctgtcgtcaaaaaggcgtatcagaaactgtgctacattcatcatatcatgggaaaggtgccagacgcttgcactgcctgcgatctggtcaatgtggatttggatgactgcatctttgaacaataaatgatttaaatcaggtatggctgccgatggttatcttccagattggctcgaggacaaccttagtgaaggaattcgcgagtggtgggctttgaaacctggagcccctcaacccaaggcaaatcaacaacatcaagacaacgctcgaggtcttgtgcttccgggttacaaataccttggacccggcaacggactcgacaagggggagccggtgaacgcagcagacgcggcggccctcgagcacgacaaggcctacgaccagcagctcaaggccggagacaacccgtacctcaagtacaaccacgccgacgccgagttccaggagcggctcaaagaagatacgtcttttgggggcaacctcgggcgagcagtcttccaggccaaaaagaggcttcttgaacctcttggtctggttgaggaagcggctaagacggctcctggaaagaagaggcctgtagagcagtctcctcaggaaccggactcctccgcgggtattggcaaatcgggtgcacagcccgctaaaaagagactcaatttcggtcagactggcgacacagagtcagtcccagaccctcaaccaatcggagaacctcccgcagccccctcaggtgtgggatctcttacaatggcttcaggtggtggcgcaccagtggcagacaataacgaaggtgccgatggagtgggtagttcctcgggaaattggcattgcgattcccaatggctgggggacagagtcatcaccaccagcacccgaacctgggccctgcccacctacaacaatcacctctacaagcaaatctccaacagcacatctggaggatcttcaaatgacaacgcctacttcggctacagcaccccctgggggtattttgacttcaacagattccactgccacttctcaccacgtgactggcagcgactcatcaacaacaactggggattccggcctaagcgactcaacttcaagctcttcaacattcaggtcaaagaggttacggacaacaatggagtcaagaccatcgccaataaccttaccagcacggtccaggtcttcacggactcagactatcagctcccgtacgtgctcgggtcggctcacgagggctgcctcccgccgttcccagcggacgttttcatgattcctcagtacgggtatctgacgcttaatgatggaagccaggccgtgggtcgttcgtccttttactgcctggaatatttcccgtcgcaaatgctaagaacgggtaacaacttccagttcagctacgagtttgagaacgtacctttccatagcagctacgctcacagccaaagcctggaccgactaatgaatccactcatcgaccaatacttgtactatctctcaaagactattaacggttctggacagaatcaacaaacgctaaaattcagtgtggccggacccagcaacatggctgtccagggaagaaactacatacctggacccagctaccgacaacaacgtgtctcaaccactgtgactcaaaacaacaacagcgaatttgcttggcctggagcttcttcttgggctctcaatggacgtaatagcttgatgaatcctggacctgctatggccagccacaaagaaggagaggaccgtttctttcctttgtctggatctttaatttttggcaaacaaggaactggaagagacaacgtggatgcggacaaagtcatgataaccaacgaagaagaaattaaaactactaacccggtagcaacggagtcctatggacaagtggccacaaaccaccagagtgcccaagcacaggcgcagaccggctgggttcaaaaccaaggaatacttccgggtatggtttggcaggacagagatgtgtacctgcaaggacccatttgggccaaaattcctcacacggacggcaactttcacccttctccgctgatgggagggtttggaatgaagcacccgcctcctcagatcctcatcaaaaacacacctgtacctgcggatcctccaacggccttcaacaaggacaagctgaactctttcatcacccagtattctactggccaagtcagcgtggagatcgagtgggagctgcagaaggaaaacagcaagcgctggaacccggagatccagtacacttccaactattacaagtctaataatgttgaatttgctgttaatactgaaggtgtatatagtgaaccccgccccattggcaccagatacctgactcgtaatctg

SEQ ID NO: 228 - DNA, 9819 bp, synthetic construct
  source 1..9819: mol_type = other DNA
atgccggggttttacgagattgtgattaaggtccccagcgaccttgacgagcatctgcccggcatttctgacagctttgtgaactgggtggccgagaaggaatgggagttgccgccagattctgacatggatctgaatctgattgagcaggcacccctgaccgtggccgagaagctgcagcgcgactttctgacggaatggcgccgtgtgagtaaggccccggaggctcttttctttgtgcaatttgagaagggagagagctacttccacatgcacgtgctcgtggaaaccaccggggtgaaatccatggttttgggacgtttcctgagtcagattcgcgaaaaactgattcagagaatttaccgcgggatcgagccgactttgccaaactggttcgcggtcacaaagaccagaaatggcgccggaggcgggaacaaggtggtggatgagtgctacatccccaattacttgctccccaaaacccagcctgagctccagtgggcgtggactaatatggaacagtatttaagcgcctgtttgaatctcacggagcgtaaacggttggtggcgcagcatctgacgcacgtgtcgcagacgcaggagcagaacaaagagaatcagaatcccaattctgatgcgccggtgatcagatcaaaaacttcagccaggtacatggagctggtcgggtggctcgtggacaaggggattacctcggagaagcagtggatccaggaggaccaggcctcatacatctccttcaatgcggcctccaactcgcggtcccaaatcaaggctgccttggacaatgcgggaaagattatgagcctgactaaaaccgcccccgactacctggtgggccagcagcccgtggaggacatttccagcaatcggatttataaaattttggaactaaacgggtacgatccccaatatgcggcttccgtctttctgggatgggccacgaaaaagttcggcaagaggaacaccatctggctgtttgggcctgcaactaccgggaagaccaacatcgcggaggccatagcccacactgtgcccttctacgggtgcgtaaactggaccaatgagaactttcccttcaacgactgtgtcgacaagatggtgatctggtgggaggaggggaagatgaccgccaaggtcgtggagtcggccaaagccattctcggaggaagcaaggtgcgcgtggaccagaaatgcaagtcctcggcccagatagacccgactcccgtgatcgtcacctccaacaccaacatgtgcgccgtgattgacgggaactcaacgaccttcgaacaccagcagccgttgcaagaccggatgttcaaatttgaactcacccgccgtctggatcatgactttgggaaggtcaccaagcaggaagtcaaagactttttccggtgggcaaaggatcacgtggttgaggtggagcatgaattctacgtcaaaaagggtggagccaagaaaagacccgcccccagtgacgcagatataagtgagcccaaacgggtgcgcgagtcagttgcgcagccatcgacgtcagacgcggaagcttcgatcaactacgcagacaggtaccaaaacaaatgttctcgtcacgtgggcatgaatctgatgctgtttccctgcagacaatgcgagagaatgaatcagaattcaaatatctgcttcactcacggacagaaagactgtttagagtgctttcccgtgtcagaatctcaacccgtttctgtcgtcaaaaaggcgtatcagaaactgtgctacattcatcatatcatgggaaaggtgccagacgcttgcactgcctgcgatctggtcaatgtggatttggatgactgcatctttgaacaataaatgatttaaatcaggtatggctgccgatggttatcttccagattggctcgaggacaaccttagtgaaggaattcgcgagtggtgggctttgaaacctggagcccctcaacccaaggcaaatcaacaacatcaagacaacgctcgaggtcttgtgcttccgggttacaaataccttggacccggcaacggactcgacaagggggagccggtgaacgcagcagacgcggcggccctcgagcacgacaaggcctacgaccagcagctcaaggccggagacaacccgtacctcaagtacaaccacgccgacgccgagttccaggagcggctcaaagaagatacgtcttttgggggcaacctcgggcgagcagtcttccaggccaaaaagaggcttcttgaacctcttggtctggttgaggaagcggctaagacggctcctggaaagaagaggcctgtagagcagtctcctcaggaaccggactcctccgcgggtattggcaaatcgggtgcacagcccgctaaaaagagactcaatttcggtcagactggcgacacagagtcagtcccagaccctcaaccaatcggagaacctcccgcagccccctcaggtgtgggatctcttacaatggcttcaggtggtggcgcaccagtggcagacaataacgaaggtgccgatggagtgggtagttcctcgggaaattggcattgcgattcccaatggctgggggacagagtcatcaccaccagcacccgaacctgggccctgcccacctacaacaatcacctctacaagcaaatctccaacagcacatctggaggatcttcaaatgacaacgcctacttcggctacagcaccccctgggggtattttgacttcaacagattccactgccacttctcaccacgtgactggcagcgactcatcaacaacaactggggattccggcctaagcgactcaacttcaagctcttcaacattcaggtcaaagaggttacggacaacaatggagtcaagaccatcgccaataaccttaccagcacggtccaggtcttcacggactcagactatcagctcccgtacgtgctcgggtcggctcacgagggctgcctcccgccgttcccagcggacgttttcatgattcctcagtacgggtatctgacgcttaatgatggaagccaggccgtgggtcgttcgtccttttactgcctggaatatttcccgtcgcaaatgctaagaacgggtaacaacttccagttcagctacgagtttgagaacgtacctttccatagcagctacgctcacagccaaagcctggaccgactaatgaatccactcatcgaccaatacttgtactatctctcaaagactattaacggttctggacagaatcaacaaacgctaaaattcagtgtggccggacccagcaacatggctgtccagggaagaaactacatacctggacccagctaccgacaacaacgtgtctcaaccactgtgactcaaaacaacaacagcgaatttgcttggcctggagcttcttcttgggctctcaatggacgtaatagcttgatgaatcctggacctgctatggccagccacaaagaaggagaggaccgtttctttcctttgtctggatctttaatttttggcaaacaaggaactggaagagacaacgtggatgcggacaaagtcatgataaccaacgaagaagaaattaaaactactaacccggtagcaacggagtcctatggacaagtggccacaaaccaccagagtgcccaagcacaggcgcagaccggctgggttcaaaaccaaggaatacttccgggtatggtttggcaggacagagatgtgtacctgcaaggacccatttgggccaaaattcctcacacggacggcaactttcacccttctccgctgatgggagggtttggaatgaagcacccgcctcctcagatcctcatcaaaaacacacctgtacctgcggatcctccaacggccttcaacaaggacaagctgaactctttcatcacccagtattctactggccaagtcagcgtggagatcgagtgggagctgcagaaggaaaacagcaagcgctggaacccggagatccagtacacttccaactattacaagtctaataatgttgaatttgctgttaatactgaaggtgtatatagtgaaccccgccccattggcaccagatacctgactcgtaatctgtaattgcctgttaatcaataaaccggttgattcgtttcagttgaactttggtctctgcgaagggcgaattcgtttaaacctgcaggactagagccgaattctgcatcgcgatagggataacagggtaataaataatgtactagagacactttcaataaaggcaaatgcttttatttgtacactctcgggtgattatttacccccacccttgccgtctgcgccgttcagaagtcgaaggggttctgtctggcatcggaatgggccacgggcagagacacgttccggtactggtgcttggtggaccacttgaactcaggcacgaccattctaggcagctctgtgaagttctcgctccacaggctccgcaccatcaccagggcgttcagcaggtcaggggcgctgattttgaagtcgcagttaggtccgccgccctgggctctgctgtttctgtacacagggttgcagcactggaacacaataagagcagggtggtgcacgctggccagcacagacttgtcgctgatcaggtcggcgtcgagatcctcggcgttagacaaggcaaaaggggtcagcttgggcagctggcggcccaggaaaggggcgtggccgggcttgctattgcactcgcatctcagaggcatcagcaggtggccgtggccggtctgggcgttggggtacagggcctgcataaaggccttgatctgtttgaaggccacttgggccttggcgccttcggagaagaacatgccgcagcttttgccgctgaactggttggcggggcaggcggcgtcgtgcacacaacaccgggcgtcggtattgctgatctgcaccacgtttctgccccatctgttcttcacgatcttggccttgctgctctgctctttcagggccctctggccgttctcagaggtgacgtccatctcgatcacatgttccttgttgatcatgatgctgccgtgcagacacttcagctcgccctcgatttccgcgcatctgtgcagccacagggcacaaccggtaggctcgtggtgcttgtatgtcacctcagcaaaagattgcaggtaggcttgcaggaatctgcccatcatggtcacgaaggtcttgttggaggtaaaagtcagctgcagtcctctgtgttcctcgttcagccatgtcttgcacacggcggccagagcctcgacctgatctggcagcagcttgaaattagccttcaggtcgttgtccacgtgatacttatccatcagtgctctggcggcttccatgcccttctcccaggcggaaacgatgggcacgctcagggggttcatcacggtgatctcgctttcagcttctgaaggttcctcctcttcctcctgtgttctcatgccccgagccacggggtcgtcctcattcagtctccgcacggttctttttcctccctttccgtgcttaatcagtacaggaggattagagaagcccaccatctggagggcgacgtcctccctttcttcttcgctatccacgatcacttctgggctggggggccgttcaggctttgggctaggccgtttttttttcttcttaggggcgatagccagatcagcggcgcttgtagagggccgaggactaggggttctaggcacgagggcgtcctggctgctgtcctcctcatcctcgctctcgatccgtctccgcattctcttcttagggggggcccgcggagggggagggctagggctaggggacgacacatcttccatggttggaggtctgcgagcagcgcctctgcctctctctggtgttgtctcgcgctgttcttcctctctagaggccatttccttctcctataggcagaaaaagatcgttgaaactcactccggggctgtggacgtcggcttaccttcgcaaatttgtacctgaggactaccacgcccacgagattaggttctacgaagaccaatcccgcccgcctaatgcggagcttaccgcctgcgtcattacccagggccacattcttggccaattgcaagccatcaacaaagcccgccaagagtttctgctacgaaagggacggggggtttacttggacccccagtccggcgaggagctcaacccaatccccccgccgccgcagccctatcagcagcagccgcgggcccttgcttcccaggatggcacccaaaaagaagctgcagctgccgccgccacccacggacgaggaggaatactgggacagtcaggcagaggaggttttggacgaggaggaggaggacatgatggaagactgggagagcctagacgaggaagcttccgaggtcgaagaggtgtcagacgaaacaccgtcaccctcggtcgcattcccctcgccggcgccccagaaatcggcaaccggttccagcatggctacaacctccgctcctcaggcgccgccggcactgcccgttcgccgacccaaccgtagatgggacaccactggaaccagggccggtaagtccaagcagccgccgccgttagcccaagagcaacaacagcgccaaggctaccgctcatggcgcgggcacaagaacgccatagttgcttgcttgcaagactgtgggggcaacatctccttcgcccgccgctttcttctctaccatcacggcgtggccttcccccgtaacatcctgcattactaccgtcatctctacagcccatactgcaccggcggcagcggcagcaacagcagcggccacacagaagcaaaggcgaccggatagcaagactctgacaaagcccaagaaatccacagcggcggcagcagcaggaggaggagcgctgcgtctggcgcccaacgaacccgtatcgacccgcgagcttagaaacaggatttttcccactctgtatgctatatttcaacagagcaggggccaagaacaagagctgaaaataaaaaacaggtctctgcgatccctcacccgcagctgcctgtatcacaaaagcgaagatcagcttcggcgcacgctggaagacgcggaggctctcttcagtaaatactgcgcgctgactcttaaggactagtttcgcgccctttctcaaatttaagcgcgaaaactacgtcatctccagcggccacacccggcgccagcacctgttgtcagcgccattttttagggcggagtaacttgtatgtgttgggaattgtagttttcttaaaatgggaagtgacgtaacgtgggaaaacggaagtgacgatttgaggaagttgtgggttttttggctttcgtttctgggcgtaggttcgcgtgcggttttctgggtgttttttgtggactttaaccgttacgtcattttttagtcctatatatactcgctctgcacttggcccttttttacactgtgactgattgagctggtgccgtgtcgagtggtgtttttttaataggttttcttttttactggtaaggctgactgttatgactacgtccggcgttccatttggcatgacactacgaccaacacgatctcggttgtctcggcgcactccgtacagtagggatcgtctacctccttttgagacagaaacccgcgctaccatactggaggatcatccgctgctgcccgaatgtaacactttgacaatgcacaacgtgagttacgtgcgaggtcttccctgcagtgtgggatttacgctgattcaggaatgggttgttccctgggatatggttctaacgcgggaggagcttgtaatcctgaggaagtgtatgcacgtgtgcctgtgttgtgccaacattgatatcatgacgagcatgatgatccatggttacgagtcctgggctctccactgtcattgttccagtcccggttccctgcagtgtatagccggcgggcaggttttggccagctggtttaggatggtggtggatggcgccatgtttaatcagaggtttatatggtaccgggaggtggtgaattacaacatgccaaaagaggtaatgtttatgtccagcgtgtttatgaggggtcgccacttaatctacctgcgcttgtggtatgatggccacgtgggttctgtggtccccgccatgagctttggatacagcgccttgcactgtgggattttgaacaatattgtggtgctgtgctgcagttactgtgctgatttaagtgagatcagggtgcgctgctgtgcccggaggacaaggcgccttatgctgcgggcggtgcgaatcatcgctgaggagaccactgccatgttgtattcctgcaggacggagcggcggcggcagcagtttattcgcgcgctgctgcagcaccaccgccctatcctgatgcacgattatgactctacccccatgtaggcgtggacttctccttcgccgcccgttaagcaaccgcaagttggacagcagcctgtggctcagcagctggacagcgacatgaacttaagtgagctgcccggggagtttattaatatcactgatgagcgtttggctcgacaggaaaccgtgtggaatataacacctaagaatatgtctgttacccatgatatgatgctttttaaggccagccggggagaaaggactgtgtactctgtgtgttgggagggaggtggcaggttgaatactagggttctgtgagtttgattaaggtacggtgatctgtataagctatgtggtggtggggctatactactgaatgaaaaatgacttgaaattttctgcaattgaaaaataaacacgttgaaacataacacaaacgattctttattcttgggcaatgtatgaaaaagtgtaagaggatgtggcaaatatttcattaatgtagttgtggccagaccagtcccatgaaaatgacatagagtatgcacttggagttgtgtctcctgtttcctgtgtaccgtttagtgtaatggttagtgttacaggtttagttttgtctccgtttaagtaaacttgactgacaatgttacttttggcagttttaccgtgagattttggataagctgataggttaggcataaatccaacagcgtttgtataggctgtcgcccctcctgacgcggtaggaggaggggagggtgccctgcatgtctgccgctgctcttgctcttgccgctgctgaggaggggggcgcatctgccgcagcaccggatgcatctgggaaaagcaaaaaaggggctcgtccctgtttccggaggaatttgcaagcggggtcttgcatgacggggaggcaaacccccgttcgccgcagtccggccggtccgagactcgaaccgggggtcccgcgactcaacccttggaaaataaccctccggctacagggagcgagccacttaatgctttcgctttccagcctaaccgcttacgctgcgcgcggccagtggccaaaaaagctagcgcagcagccgccgcgcctggaaggaagccaaaaggagcactcccccgttgtctgacgtcgcacacctgggttcgacacgcgggcggtaaccgcatggatcacggcggacggccggatacggggctcgaaccccggtcgtccgccatgatacccttgcgaatttatccaccagaccacggaagagtgcccgcttacaggctctccttttgcacggtctagagcgtcaacgattgcgcgcgcctgaccggccagagcgtcccgaccatggagcactttttgccgctgcgcaacatctggaaccgcgtccgcgactttccgcgcgcctccaccaccgccgccggcatcacctggatgtccaggtacatctacggata

SEQ ID NO: 229 - DNA, 12582 bp, synthetic construct
  source 1..12582: mol_type = other DNA
tcgcgcgtttcggtgatgacggtgaaaacctctgacacatgcagctcccggagacggtcacagcttgtctgtaagcggatgccgggagcagacaagcccgtcagggcgcgtcagcgggtgttggcgggtgtcggggctggcttaactatgcggcatcagagcagattgtactgagagtgcaccatatgcggtgtgaaataccgcacagatgcgtaaggagaaaataccgcatcaggcgccattcgccattcaggctgcgcaactgttgggaagggcgatcggtgcgggcctcttcgctattacgccagctggcgaaagggggatgtgctgcaaggcgattaagttgggtaacgccagggttttcccagtcacgacgttgtaaaacgacggccagagaattccgcagggtctccattttgaagcgggaggtttgaacgcgcagccgccatgccggggttttacgagattgtgattaaggtccccagcgaccttgacgagcatctgcccggcatttctgacagctttgtgaactgggtggccgagaaggaatgggagttgccgccagattctgacatggatctgaatctgattgagcaggcacccctgaccgtggccgagaagctgcagcgcgactttctgacggaatggcgccgtgtgagtaaggccccggaggctcttttctttgtgcaatttgagaagggagagagctacttccacatgcacgtgctcgtggaaaccaccggggtgaaatccatggttttgggacgtttcctgagtcagattcgcgaaaaactgattcagagaatttaccgcgggatcgagccgactttgccaaactggttcgcggtcacaaagaccagaaatggcgccggaggcgggaacaaggtggtggatgagtgctacatccccaattacttgctccccaaaacccagcctgagctccagtgggcgtggactaatatggaacagtatttaagcgcctgtttgaatctcacggagcgtaaacggttggtggcgcagcatctgacgcacgtgtcgcagacgcaggagcagaacaaagagaatcagaatcccaattctgatgcgccggtgatcagatcaaaaacttcagccaggtacatggagctggtcgggtggctcgtggacaaggggattacctcggagaagcagtggatccaggaggaccaggcctcatacatctccttcaatgcggcctccaactcgcggtcccaaatcaaggctgccttggacaatgcgggaaagattatgagcctgactaaaaccgcccccgactacctggtgggccagcagcccgtggaggacatttccagcaatcggatttataaaattttggaactaaacgggtacgatccccaatatgcggcttccgtctttctgggatgggccacgaaaaagttcggcaagaggaacaccatctggctgtttgggcctgcaactaccgggaagaccaacatcgcggaggccatagcccacactgtgcccttctacgggtgcgtaaactggaccaatgagaactttcccttcaacgactgtgtcgacaagatggtgatctggtgggaggaggggaagatgaccgccaaggtcgtggagtcggccaaagccattctcggaggaagcaaggtgcgcgtggaccagaaatgcaagtcctcggcccagatagacccgactcccgtgatcgtcacctccaacaccaacatgtgcgccgtgattgacgggaactcaacgaccttcgaacaccagcagccgttgcaagaccggatgttcaaatttgaactcacccgccgtctggatcatgactttgggaaggtcaccaagcaggaagtcaaagactttttccggtgggcaaaggatcacgtggttgaggtggagcatgaattctacgtcaaaaagggtggagccaagaaaagacccgcccccagtgacgcagatataagtgagcccaaacgggtgcgcgagtcagttgcgcagccatcgacgtcagacgcggaagcttcgatcaactacgcagacaggtaccaaaacaaatgttctcgtcacgtgggcatgaatctgatgctgtttccctgcagacaatgcgagagaatgaatcagaattcaaatatctgcttcactcacggacagaaagactgtttagagtgctttcccgtgtcagaatctcaacccgtttctgtcgtcaaaaaggcgtatcagaaactgtgctacattcatcatatcatgggaaaggtgccagacgcttgcactgcctgcgatctggtcaatgtggatttggatgactgcatctttgaacaataaatgatttaaatcaggtatggctgccgatggttatcttccagattggctcgaggacaaccttagtgaaggaattcgcgagtggtgggctttgaaacctggagcccctcaacccaaggcaaatcaacaacatcaagacaacgctcgaggtcttgtgcttccgggttacaaataccttggacccggcaacggactcgacaagggggagccggtgaacgcagcagacgcggcggccctcgagcacgacaaggcctacgaccagcagctcaaggccggagacaacccgtacctcaagtacaaccacgccgacgccgagttccaggagcggctcaaagaagatacgtcttttgggggcaacctcgggcgagcagtcttccaggccaaaaagaggcttcttgaacctcttggtctggttgaggaagcggctaagacggctcctggaaagaagaggcctgtagagcagtctcctcaggaaccggactcctccgcgggtattggcaaatcgggtgcacagcccgctaaaaagagactcaatttcggtcagactggcgacacagagtcagtcccagaccctcaaccaatcggagaacctcccgcagccccctcaggtgtgggatctcttacaatggcttcaggtggtggcgcaccagtggcagacaataacgaaggtgccgatggagtgggtagttcctcgggaaattggcattgcgattcccaatggctgggggacagagtcatcaccaccagcacccgaacctgggccctgcccacctacaacaatcacctctacaagcaaatctccaacagcacatctggaggatcttcaaatgacaacgcctacttcggctacagcaccccctgggggtattttgacttcaacagattccactgccacttctcaccacgtgactggcagcgactcatcaacaacaactggggattccggcctaagcgactcaacttcaagctcttcaacattcaggtcaaagaggttacggacaacaatggagtcaagaccatcgccaataaccttaccagcacggtccaggtcttcacggactcagactatcagctcccgtacgtgctcgggtcggctcacgagggctgcctcccgccgttcccagcggacgttttcatgattcctcagtacgggtatctgacgcttaatgatggaagccaggccgtgggtcgttcgtccttttactgcctggaatatttcccgtcgcaaatgctaagaacgggtaacaacttccagttcagctacgagtttgagaacgtacctttccatagcagctacgctcacagccaaagcctggaccgactaatgaatccactcatcgaccaatacttgtactatctctcaaagactattaacggttctggacagaatcaacaaacgctaaaattcagtgtggccggacccagcaacatggctgtccagggaagaaactacatacctggacccagctaccgacaacaacgtgtctcaaccactgtgactcaaaacaacaacagcgaatttgcttggcctggagcttcttcttgggctctcaatggacgtaatagcttgatgaatcctggacctgctatggccagccacaaagaaggagaggaccgtttctttcctttgtctggatctttaatttttggcaaacaaggaactggaagagacaacgtggatgcggacaaagtcatgataaccaacgaagaagaaattaaaactactaacccggtagcaacggagtcctatggacaagtggccacaaaccaccagagtgcccaagcacaggcgcagaccggctgggttcaaaaccaaggaatacttccgggtatggtttggcaggacagagatgtgtacctgcaaggacccatttgggccaaaattcctcacacggacggcaactttcacccttctccgctgatgggagggtttggaatgaagcacccgcctcctcagatcctcatcaaaaacacacctgtacctgcggatcctccaacggccttcaacaaggacaagctgaactctttcatcacccagtattctactggccaagtcagcgtggagatcgagtgggagctgcagaaggaaaacagcaagcgctggaacccggagatccagtacacttccaactattacaagtctaataatgttgaatttgctgttaatactgaaggtgtatatagtgaaccccgccccattggcaccagatacctgactcgtaatctgtaattgcctgttaatcaataaaccggttgattcgtttcagttgaactttggtctctgcgaagggcgaattcgtttaaacctgcaggactagagccgaattctgcatcgcgatagggataacagggtaataaataatgtactagagacactttcaataaaggcaaatgcttttatttgtacactctcgggtgattatttacccccacccttgccgtctgcgccgttcagaagtcgaaggggttctgtctggcatcggaatgggccacgggcagagacacgttccggtactggtgcttggtggaccacttgaactcaggcacgaccattctaggcagctctgtgaagttctcgctccacaggctccgcaccatcaccagggcgttcagcaggtcaggggcgctgattttgaagtcgcagttaggtccgccgccctgggctctgctgtttctgtacacagggttgcagcactggaacacaataagagcagggtggtgcacgctggccagcacagacttgtcgctgatcaggtcggcgtcgagatcctcggcgttagacaaggcaaaaggggtcagcttgggcagctggcggcccaggaaaggggcgtggccgggcttgctattgcactcgcatctcagaggcatcagcaggtggccgtggccggtctgggcgttggggtacagggcctgcataaaggccttgatctgtttgaaggccacttgggccttggcgccttcggagaagaacatgccgcagcttttgccgctgaactggttggcggggcaggcggcgtcgtgcacacaacaccgggcgtcggtattgctgatctgcaccacgtttctgccccatctgttcttcacgatcttggccttgctgctctgctctttcagggccctctggccgttctcagaggtgacgtccatctcgatcacatgttccttgttgatcatgatgctgccgtgcagacacttcagctcgccctcgatttccgcgcatctgtgcagccacagggcacaaccggtaggctcgtggtgcttgtatgtcacctcagcaaaagattgcaggtaggcttgcaggaatctgcccatcatggtcacgaaggtcttgttggaggtaaaagtcagctgcagtcctctgtgttcctcgttcagccatgtcttgcacacggcggccagagcctcgacctgatctggcagcagcttgaaattagccttcaggtcgttgtccacgtgatacttatccatcagtgctctggcggcttccatgcccttctcccaggcggaaacgatgggcacgctcagggggttcatcacggtgatctcgctttcagcttctgaaggttcctcctcttcctcctgtgttctcatgccccgagccacggggtcgtcctcattcagtctccgcacggttctttttcctccctttccgtgcttaatcagtacaggaggattagagaagcccaccatctggagggcgacgtcctccctttcttcttcgctatccacgatcacttctgggctggggggccgttcaggctttgggctaggccgtttttttttcttcttaggggcgatagccagatcagcggcgcttgtagagggccgaggactaggggttctaggcacgagggcgtcctggctgctgtcctcctcatcctcgctctcgatccgtctccgcattctcttcttagggggggcccgcggagggggagggctagggctaggggacgacacatcttccatggttggaggtctgcgagcagcgcctctgcctctctctggtgttgtctcgcgctgttcttcctctctagaggccatttccttctcctataggcagaaaaagatcgttgaaactcactccggggctgtggacgtcggcttaccttcgcaaatttgtacctgaggactaccacgcccacgagattaggttctacgaagaccaatcccgcccgcctaatgcggagcttaccgcctgcgtcattacccagggccacattcttggccaattgcaagccatcaacaaagcccgccaagagtttctgctacgaaagggacggggggtttacttggacccccagtccggcgaggagctcaacccaatccccccgccgccgcagccctatcagcagcagccgcgggcccttgcttcccaggatggcacccaaaaagaagctgcagctgccgccgccacccacggacgaggaggaatactgggacagtcaggcagaggaggttttggacgaggaggaggaggacatgatggaagactgggagagcctagacgaggaagcttccgaggtcgaagaggtgtcagacgaaacaccgtcaccctcggtcgcattcccctcgccggcgccccagaaatcggcaaccggttccagcatggctacaacctccgctcctcaggcgccgccggcactgcccgttcgccgacccaaccgtagatgggacaccactggaaccagggccggtaagtccaagcagccgccgccgttagcccaagagcaacaacagcgccaaggctaccgctcatggcgcgggcacaagaacgccatagttgcttgcttgcaagactgtgggggcaacatctccttcgcccgccgctttcttctctaccatcacggcgtggccttcccccgtaacatcctgcattactaccgtcatctctacagcccatactgcaccggcggcagcggcagcaacagcagcggccacacagaagcaaaggcgaccggatagcaagactctgacaaagcccaagaaatccacagcggcggcagcagcaggaggaggagcgctgcgtctggcgcccaacgaacccgtatcgacccgcgagcttagaaacaggatttttcccactctgtatgctatatttcaacagagcaggggccaagaacaagagctgaaaataaaaaacaggtctctgcgatccctcacccgcagctgcctgtatcacaaaagcgaagatcagcttcggcgcacgctggaagacgcggaggctctcttcagtaaatactgcgcgctgactcttaaggactagtttcgcgccctttctcaaatttaagcgcgaaaactacgtcatctccagcggccacacccggcgccagcacctgttgtcagcgccattttttagggcggagtaacttgtatgtgttgggaattgtagttttcttaaaatgggaagtgacgtaacgtgggaaaacggaagtgacgatttgaggaagttgtgggttttttggctttcgtttctgggcgtaggttcgcgtgcggttttctgggtgttttttgtggactttaaccgttacgtcattttttagtcctatatatactcgctctgcacttggcccttttttacactgtgactgattgagctggtgccgtgtcgagtggtgtttttttaataggttttcttttttactggtaaggctgactgttatgactacgtccggcgttccatttggcatgacactacgaccaacacgatctcggttgtctcggcgcactccgtacagtagggatcgtctacctccttttgagacagaaacccgcgctaccatactggaggatcatccgctgctgcccgaatgtaacactttgacaatgcacaacgtgagttacgtgcgaggtcttccctgcagtgtgggatttacgctgattcaggaatgggttgttccctgggatatggttctaacgcgggaggagcttgtaatcctgaggaagtgtatgcacgtgtgcctgtgttgtgccaacattgatatcatgacgagcatgatgatccatggttacgagtcctgggctctccactgtcattgttccagtcccggttccctgcagtgtatagccggcgggcaggttttggccagctggtttaggatggtggtggatggcgccatgtttaatcagaggtttatatggtaccgggaggtggtgaattacaacatgccaaaagaggtaatgtttatgtccagcgtgtttatgaggggtcgccacttaatctacctgcgcttgtggtatgatggccacgtgggttctgtggtccccgccatgagctttggatacagcgccttgcactgtgggattttgaacaatattgtggtgctgtgctgcagttactgtgctgatttaagtgagatcagggtgcgctgctgtgcccggaggacaaggcgccttatgctgcgggcggtgcgaatcatcgctgaggagaccactgccatgttgtattcctgcaggacggagcggcggcggcagcagtttattcgcgcgctgctgcagcaccaccgccctatcctgatgcacgattatgactctacccccatgtaggcgtggacttctccttcgccgcccgttaagcaaccgcaagttggacagcagcctgtggctcagcagctggacagcgacatgaacttaagtgagctgcccggggagtttattaatatcactgatgagcgtttggctcgacaggaaaccgtgtggaatataacacctaagaatatgtctgttacccatgatatgatgctttttaaggccagccggggagaaaggactgtgtactctgtgtgttgggagggaggtggcaggttgaatactagggttctgtgagtttgattaaggtacggtgatctgtataagctatgtggtggtggggctatactactgaatgaaaaatgacttgaaattttctgcaattgaaaaataaacacgttgaaacataacacaaacgattctttattcttgggcaatgtatgaaaaagtgtaagaggatgtggcaaatatttcattaatgtagttgtggccagaccagtcccatgaaaatgacatagagtatgcacttggagttgtgtctcctgtttcctgtgtaccgtttagtgtaatggttagtgttacaggtttagttttgtctccgtttaagtaaacttgactgacaatgttacttttggcagttttaccgtgagattttggataagctgataggttaggcataaatccaacagcgtttgtataggctgtcgcccctcctgacgcggtaggaggaggggagggtgccctgcatgtctgccgctgctcttgctcttgccgctgctgaggaggggggcgcatctgccgcagcaccggatgcatctgggaaaagcaaaaaaggggctcgtccctgtttccggaggaatttgcaagcggggtcttgcatgacggggaggcaaacccccgttcgccgcagtccggccggtccgagactcgaaccgggggtcccgcgactcaacccttggaaaataaccctccggctacagggagcgagccacttaatgctttcgctttccagcctaaccgcttacgctgcgcgcggccagtggccaaaaaagctagcgcagcagccgccgcgcctggaaggaagccaaaaggagcactcccccgttgtctgacgtcgcacacctgggttcgacacgcgggcggtaaccgcatggatcacggcggacggccggatacggggctcgaaccccggtcgtccgccatgatacccttgcgaatttatccaccagaccacggaagagtgcccgcttacaggctctccttttgcacggtctagagcgtcaacgattgcgcgcgcctgaccggccagagcgtcccgaccatggagcactttttgccgctgcgcaacatctggaaccgcgtccgcgactttccgcgcgcctccaccaccgccgccggcatcacctggatgtccaggtacatctacggatatggcaaacagctattatgggtattatgggtgcggccgcggatcccgggcccgtcgactgcagaggcctgcatgcaagcttggtgtaatcatggtcatagctgtttcctgtgtgaaattgttatccgctcacaattccacacaacatacgagccggaagcataaagtgtaaagcctggggtgcctaatgagtgagctaactcacattaattgcgttgcgctcactgcccgctttccagtcgggaaacctgtcgtgccagctgcattaatgaatcggccaacgcgcggggagaggcggtttgcgtattgggcgctcttccgcttcctcgctcactgactcgctgcgctcggtcgttcggctgcggcgagcggtatcagctcactcaaaggcggtaatacggttatccacagaatcaggggataacgcaggaaagaacatgtgagcaaaaggccagcaaaaggccaggaaccgtaaaaaggccgcgttgctggcgtttttccataggctccgcccccctgacgagcatcacaaaaatcgacgctcaagtcagaggtggcgaaacccgacaggactataaagataccaggcgtttccccctggaagctccctcgtgcgctctcctgttccgaccctgccgcttaccggatacctgtccgcctttctcccttcgggaagcgtggcgctttctcatagctcacgctgtaggtatctcagttcggtgtaggtcgttcgctccaagctgggctgtgtgcacgaaccccccgttcagcccgaccgctgcgccttatccggtaactatcgtcttgagtccaacccggtaagacacgacttatcgccactggcagcagccactggtaacaggattagcagagcgaggtatgtaggcggtgctacagagttcttgaagtggtggcctaactacggctacactagaagaacagtatttggtatctgcgctctgctgaagccagttaccttcggaaaaagagttggtagctcttgatccggcaaacaaaccaccgctggtagcggtggtttttttgtttgcaagcagcagattacgcgcagaaaaaaaggatctcaagaagatcctttgatcttttctacggggtctgacgctcagtggaacgaaaactcacgttaagggattttggtcatgagattatcaaaaaggatcttcacctagaaggtcctgtattagaggtcacgtgagtgttttgcgacattttgcgacaccatgtggtcacgctgggtatttaagcccgagtgagcacgcagggtctccattttgaagcgggaggtttgaacgcgcagccgccatccttttaaattaaaaatgaagttttaaatcaagcccaatctgaataatgttacaaccaattaaccaattctgattagaaaaactcatcgagcatcaaatgaaactgcaatttattcatatcaggattatcaataccatatttttgaaaaagccgtttctgtaatgaaggagaaaactcaccgaggcagttccataggatggcaagatcctggtatcggtctgcgattccgactcgtccaacatcaatacaacctattaatttcccctcgtcaaaaataaggttatcaagtgagaaatcaccatgagtgacgactgaatccggtgagaatggcaaaagtttatgcatttctttccagacttgttcaacaggccagccattacgctcgtcatcaaaatcactcgcatcaaccaaaccgttattcattcgtgattgcgcctgagcgagacgaaatacgcgatcgctgttaaaaggacaattacaaacaggaatcgaatgcaaccggcgcaggaacactgccagcgcatcaacaatattttcacctgaatcaggatattcttctaatacctggaatgctgtttttccggggatcgcagtggtgagtaaccatgcatcatcaggagtacggataaaatgcttgatggtcggaagaggcataaattccgtcagccagtttagtctgaccatctcatctgtaacatcattggcaacgctacctttgccatgtttcagaaacaactctggcgcatcgggcttcccatacaagcgatagattgtcgcacctgattgcccgacattatcgcgagcccatttatacccatataaatcagcatccatgttggaatttaatcgcggcctcgacgtttcccgttgaatatggctcataacaccccttgtattactgtttatgtaagcagacagttttattgttcatgatgatatatttttatcttgtgcaatgtaacatcagagattttgagacacgggccagagctgca

SEQ ID NO: 230 - DNA, 5505 bp, synthetic construct; identical to SEQ ID NO: 106
  source 1..5505: mol_type = other DNA

SEQ ID NO: 231 - DNA, 2208 bp, synthetic construct
  source 1..2208: mol_type = other DNA
atggctgccgatggttatcttccagattggctcgaggacaaccttagtgaaggaattcgcgagtggtgggctttgaaacctggagcccctcaacccaaggcaaatcaacaacatcaagacaacgctcgaggtcttgtgcttccgggttacaaataccttggacccggcaacggactcgacaagggggagccggtcaacgcagcagacgcggcggccctcgagcacgacaaggcctacgaccagcagctcaaggccggagacaacccgtacctcaagtacaaccacgccgacgccgagttccaggagcggctgaaagaagatacgtcttttgggggcaacctcgggcgagcagtcttccaggccaaaaagaggcttcttgaacctcttggtctggttgaggaagcggctaagacggctcctggaaagaagaggcctgtagagcagtctcctcaggaaccggactcctccgcgggtattggcaaatcgggtgcacagcccgctaaaaagagactcaatttcggtcagactggcgacacagagtcagtcccagaccctcaaccaatcggagaacctcccgcagccccctcaggtgtgggatctcttacaatggcttcaggtggtggcgcaccagtggcagacaataacgaaggtgccgatggagtgggtagttcctcgggaaattggcattgcgattcccaatggctgggggacagagtcatcaccaccagcacccgaacctgggccctgcccacctacaacaatcacctctacaagcaaatctccaacagcacatctggaggatcttcaaatgacaacgcctacttcggctacagcaccccctgggggtattttgacttcaacagattccactgccacttctcaccacgtgactggcagcgactcatcaacaacaactggggattccggcctaagcgactcaacttcaagctcttcaacattcaggtcaaagaggttacggacaacaatggagtcaagaccatcgccaataaccttaccagcacggtccaggtcttcacggactcagactatcagctcccgtacgtgctcgggtcggctcacgagggctgcctcccgccgttcccagcggacgttttcatgattcctcagtacgggtatctgacgcttaatgatggaagccaggccgtgggtcgttcgtccttttactgcctggaatatttcccgtcgcaaatgctaagaacgggtaacaacttccagttcagctacgagtttgagaacgtacctttccatagcagctacgctcacagccaaagcctggaccgactaatgaatccactcatcgaccaatacttgtactatctctcaaagactattaacggttctggacagaatcaacaaacgctaaaattcagtgtggccggacccagcaacatggctgtccagggaagaaactacatacctggacccagctaccgacaacaacgtgtctcaaccactgtgactcaaaacaacaacagcgaatttgcttggcctggagcttcttcttgggctctcaatggacgtaatagcttgatgaatcctggacctgctatggccagccacaaagaaggagaggaccgtttctttcctttgtctggatctttaatttttggcaaacaaggaactggaagagacaacgtggatgcggacaaagtcatgataaccaacgaagaagaaattaaaactactaacccggtagcaacggagtcctatggacaagtggccacaaaccaccagagtgcccaagcacaggcgcagaccggctgggttcaaaaccaaggaatacttccgggtatggtttggcaggacagagatgtgtacctgcaaggacccatttgggccaaaattcctcacacggacggcaactttcacccttctccgctgatgggagggtttggaatgaagcacccgcctcctcagatcctcatcaaaaacacacctgtacctgcggatcctccaacggccttcaacaaggacaagctgaactctttcatcacccagtattctactggccaagtcagcgtggagatcgagtgggagctgcagaaggaaaacagcaagcgctggaacccggagatccagtacacttccaactattacaagtctaataatgttgaatttgctgttaatactgaaggtgtatatagtgaaccccgccccattggcaccagatacctgactcgtaatctg

SEQ ID NO: 232 - DNA, 4090 bp, synthetic construct
  source 1..4090: mol_type = other DNA
atgccggggttttacgagattgtgattaaggtccccagcgaccttgacgagcatctgcccggcatttctgacagctttgtgaactgggtggccgagaaggaatgggagttgccgccagattctgacatggatctgaatctgattgagcaggcacccctgaccgtggccgagaagctgcagcgcgactttctgacggaatggcgccgtgtgagtaaggccccggaggctcttttctttgtgcaatttgagaagggagagagctacttccacatgcacgtgctcgtggaaaccaccggggtgaaatccatggttttgggacgtttcctgagtcagattcgcgaaaaactgattcagagaatttaccgcgggatcgagccgactttgccaaactggttcgcggtcacaaagaccagaaatggcgccggaggcgggaacaaggtggtggatgagtgctacatccccaattacttgctccccaaaacccagcctgagctccagtgggcgtggactaatatggaacagtatttaagcgcctgtttgaatctcacggagcgtaaacggttggtggcgcagcatctgacgcacgtgtcgcagacgcaggagcagaacaaagagaatcagaatcccaattctgatgcgccggtgatcagatcaaaaacttcagccaggtacatggagctggtcgggtggctcgtggacaaggggattacctcggagaagcagtggatccaggaggaccaggcctcatacatctccttcaatgcggcctccaactcgcggtcccaaatcaaggctgccttggacaatgcgggaaagattatgagcctgactaaaaccgcccccgactacctggtgggccagcagcccgtggaggacatttccagcaatcggatttataaaattttggaactaaacgggtacgatccccaatatgcggcttccgtctttctgggatgggccacgaaaaagttcggcaagaggaacaccatctggctgtttgggcctgcaactaccgggaagaccaacatcgcggaggccatagcccacactgtgcccttctacgggtgcgtaaactggaccaatgagaactttcccttcaacgactgtgtcgacaagatggtgatctggtgggaggaggggaagatgaccgccaaggtcgtggagtcggccaaagccattctcggaggaagcaaggtgcgcgtggaccagaaatgcaagtcctcggcccagatagacccgactcccgtgatcgtcacctccaacaccaacatgtgcgccgtgattgacgggaactcaacgaccttcgaacaccagcagccgttgcaagaccggatgttcaaatttgaactcacccgccgtctggatcatgactttgggaaggtcaccaagcaggaagtcaaagactttttccggtgggcaaaggatcacgtggttgaggtggagcatgaattctacgtcaaaaagggtggagccaagaaaagacccgcccccagtgacgcagatataagtgagcccaaacgggtgcgcgagtcagttgcgcagccatcgacgtcagacgcggaagcttcgatcaactacgcagacaggtaccaaaacaaatgttctcgtcacgtgggcatgaatctgatgctgtttccctgcagacaatgcgagagaatgaatcagaattcaaatatctgcttcactcacggacagaaagactgtttagagtgctttcccgtgtcagaatctcaacccgtttctgtcgtcaaaaaggcgtatcagaaactgtgctacattcatcatatcatgggaaaggtgccagacgcttgcactgcctgcgatctggtcaatgtggatttggatgactgcatctttgaacaataaatgatttaaatcaggtatggctgccgatggttatcttccagattggctcgaggacaaccttagtgaaggaattcgcgagtggtgggctttgaaacctggagcccctcaacccaaggcaaatcaacaacatcaagacaacgctcgaggtcttgtgcttccgggttacaaataccttggacccggcaacggactcgacaagggggagccggtcaacgcagcagacgcggcggccctcgagcacgacaaggcctacgaccagcagctcaaggccggagacaacccgtacctcaagtacaaccacgccgacgccgagttccaggagcggctgaaagaagatacgtcttttgggggcaacctcgggcgagcagtcttccaggccaaaaagaggcttcttgaacctcttggtctggttgaggaagcggctaagacggctcctggaaagaagaggcctgtagagcagtctcctcaggaaccggactcctccgcgggtattggcaaatcgggtgcacagcccgctaaaaagagactcaatttcggtcagactggcgacacagagtcagtcccagaccctcaaccaatcggagaacctcccgcagccccctcaggtgtgggatctcttacaatggcttcaggtggtggcgcaccagtggcagacaataacgaaggtgccgatggagtgggtagttcctcgggaaattggcattgcgattcccaatggctgggggacagagtcatcaccaccagcacccgaacctgggccctgcccacctacaacaatcacctctacaagcaaatctccaacagcacatctggaggatcttcaaatgacaacgcctacttcggctacagcaccccctgggggtattttgacttcaacagattccactgccacttctcaccacgtgactggcagcgactcatcaacaacaactggggattccggcctaagcgactcaacttcaagctcttcaacattcaggtcaaagaggttacggacaacaatggagtcaagaccatcgccaataaccttaccagcacggtccaggtcttcacggactcagactatcagctcccgtacgtgctcgggtcggctcacgagggctgcctcccgccgttcccagcggacgttttcatgattcctcagtacgggtatctgacgcttaatgatggaagccaggccgtgggtcgttcgtccttttactgcctggaatatttcccgtcgcaaatgctaagaacgggtaacaacttccagttcagctacgagtttgagaacgtacctttccatagcagctacgctcacagccaaagcctggaccgactaatgaatccactcatcgaccaatacttgtactatctctcaaagactattaacggttctggacagaatcaacaaacgctaaaattcagtgtggccggacccagcaacatggctgtccagggaagaaactacatacctggacccagctaccgacaacaacgtgtctcaaccactgtgactcaaaacaacaacagcgaatttgcttggcctggagcttcttcttgggctctcaatggacgtaatagcttgatgaatcctggacctgctatggccagccacaaagaaggagaggaccgtttctttcctttgtctggatctttaatttttggcaaacaaggaactggaagagacaacgtggatgcggacaaagtcatgataaccaacgaagaagaaattaaaactactaacccggtagcaacggagtcctatggacaagtggccacaaaccaccagagtgcccaagcacaggcgcagaccggctgggttcaaaaccaaggaatacttccgggtatggtttggcaggacagagatgtgtacctgcaaggacccatttgggccaaaattcctcacacggacggcaactttcacccttctccgctgatgggagggtttggaatgaagcacccgcctcctcagatcctcatcaaaaacacacctgtacctgcggatcctccaacggccttcaacaaggacaagctgaactctttcatcacccagtattctactggccaagtcagcgtggagatcgagtgggagctgcagaaggaaaacagcaagcgctggaacccggagatccagtacacttccaactattacaagtctaataatgttgaatttgctgttaatactgaaggtgtatatagtgaaccccgccccattggcaccagatacctgactcgtaatctg

SEQ ID NO: 233 - DNA, 9819 bp, synthetic construct
  source 1..9819: mol_type = other DNA
atgccggggttttacgagattgtgattaaggtccccagcgaccttgacgagcatctgcccggcatttctgacagctttgtgaactgggtggccgagaaggaatgggagttgccgccagattctgacatggatctgaatctgattgagcaggcacccctgaccgtggccgagaagctgcagcgcgactttctgacggaatggcgccgtgtgagtaaggccccggaggctcttttctttgtgcaatttgagaagggagagagctacttccacatgcacgtgctcgtggaaaccaccggggtgaaatccatggttttgggacgtttcctgagtcagattcgcgaaaaactgattcagagaatttaccgcgggatcgagccgactttgccaaactggttcgcggtcacaaagaccagaaatggcgccggaggcgggaacaaggtggtggatgagtgctacatccccaattacttgctccccaaaacccagcctgagctccagtgggcgtggactaatatggaacagtatttaagcgcctgtttgaatctcacggagcgtaaacggttggtggcgcagcatctgacgcacgtgtcgcagacgcaggagcagaacaaagagaatcagaatcccaattctgatgcgccggtgatcagatcaaaaacttcagccaggtacatggagctggtcgggtggctcgtggacaaggggattacctcggagaagcagtggatccaggaggaccaggcctcatacatctccttcaatgcggcctccaactcgcggtcccaaatcaaggctgccttggacaatgcgggaaagattatgagcctgactaaaaccgcccccgactacctggtgggccagcagcccgtggaggacatttccagcaatcggatttataaaattttggaactaaacgggtacgatccccaatatgcggcttccgtctttctgggatgggccacgaaaaagttcggcaagaggaacaccatctggctgtttgggcctgcaactaccgggaagaccaacatcgcggaggccatagcccacactgtgcccttctacgggtgcgtaaactggaccaatgagaactttcccttcaacgactgtgtcgacaagatggtgatctggtgggaggaggggaagatgaccgccaaggtcgtggagtcggccaaagccattctcggaggaagcaaggtgcgcgtggaccagaaatgcaagtcctcggcccagatagacccgactcccgtgatcgtcacctccaacaccaacatgtgcgccgtgattgacgggaactcaacgaccttcgaacaccagcagccgttgcaagaccggatgttcaaatttgaactcacccgccgtctggatcatgactttgggaaggtcaccaagcaggaagtcaaagactttttccggtgggcaaaggatcacgtggttgaggtggagcatgaattctacgtcaaaaagggtggagccaagaaaagacccgcccccagtgacgcagatataagtgagcccaaacgggtgcgcgagtcagttgcgcagccatcgacgtcagacgcggaagcttcgatcaactacgcagacaggtaccaaaacaaatgttctcgtcacgtgggcatgaatctgatgctgtttccctgcagacaatgcgagagaatgaatcagaattcaaatatctgcttcactcacggacagaaagactgtttagagtgctttcccgtgtcagaatctcaacccgtttctgtcgtcaaaaaggcgtatcagaaactgtgctacattcatcatatcatgggaaaggtgccagacgcttgcactgcctgcgatctggtcaatgtggatttggatgactgcatctttgaacaataaatgatttaaatcaggtatggctgccgatggttatcttccagattggctcgaggacaaccttagtgaaggaattcgcgagtggtgggctttgaaacctggagcccctcaacccaaggcaaatcaacaacatcaagacaacgctcgaggtcttgtgcttccgggttacaaataccttggacccggcaacggactcgacaagggggagccggtcaacgcagcagacgcggcggccctcgagcacgacaaggcctacgaccagcagctcaaggccggagacaacccgtacctcaagtacaaccacgccgacgccgagttccaggagcggctgaaagaagatacgtcttttgggggcaacctcgggcgagcagtcttccaggccaaaaagaggcttcttgaacctcttggtctggttgaggaagcggctaagacggctcctggaaagaagaggcctgtagagcagtctcctcaggaaccggactcctccgcgggtattggcaaatcgggtgcacagcccgctaaaaagagactcaatttcggtcagactggcgacacagagtcagtcccagaccctcaaccaatcggagaacctcccgcagccccctcaggtgtgggatctcttacaatggcttcaggtggtggcgcaccagtggcagacaataacgaaggtgccgatggagtgggtagttcctcgggaaattggcattgcgattcccaatggctgggggacagagtcatcaccaccagcacccgaacctgggccctgcccacctacaacaatcacctctacaagcaaatctccaacagcacatctggaggatcttcaaatgacaacgcctacttcggctacagcaccccctgggggtattttgacttcaacagattccactgccacttctcaccacgtgactggcagcgactcatcaacaacaactggggattccggcctaagcgactcaacttcaagctcttcaacattcaggtcaaagaggttacggacaacaatggagtcaagaccatcgccaataaccttaccagcacggtccaggtcttcacggactcagactatcagctcccgtacgtgctcgggtcggctcacgagggctgcctcccgccgttcccagcggacgttttcatgattcctcagtacgggtatctgacgcttaatgatggaagccaggccgtgggtcgttcgtccttttactgcctggaatatttcccgtcgcaaatgctaagaacgggtaacaacttccagttcagctacgagtttgagaacgtacctttccatagcagctacgctcacagccaaagcctggaccgactaatgaatccactcatcgaccaatacttgtactatctctcaaagactattaacggttctggacagaatcaacaaacgctaaaattcagtgtggccggacccagcaacatggctgtccagggaagaaactacatacctggacccagctaccgacaacaacgtgtctcaaccactgtgactcaaaacaacaacagcgaatttgcttggcctggagcttcttcttgggctctcaatggacgtaatagcttgatgaatcctggacctgctatggccagccacaaagaaggagaggaccgtttctttcctttgtctggatctttaatttttggcaaacaaggaactggaagagacaacgtggatgcggacaaagtcatgataaccaacgaagaagaaattaaaactactaacccggtagcaacggagtcctatggacaagtggccacaaaccaccagagtgcccaagcacaggcgcagaccggctgggttcaaaaccaaggaatacttccgggtatggtttggcaggacagagatgtgtacctgcaaggacccatttgggccaaaattcctcacacggacggcaactttcacccttctccgctgatgggagggtttggaatgaagcacccgcctcctcagatcctcatcaaaaacacacctgtacctgcggatcctccaacggccttcaacaaggacaagctgaactctttcatcacccagtattctactggccaagtcagcgtggagatcgagtgggagctgcagaaggaaaacagcaagcgctggaacccggagatccagtacacttccaactattacaagtctaataatgttgaatttgctgttaatactgaaggtgtatatagtgaaccccgccccattggcaccagatacctgactcgtaatctgtaattgcctgttaatcaataaaccggttgattcgtttcagttgaactttggtctctgcgaagggcgaattcgtttaaacctgcaggactagagccgaattctgcatcgcgatagggataacagggtaataaataatgtactagagacactttcaataaaggcaaatgcttttatttgtacactctcgggtgattatttacccccacccttgccgtctgcgccgttcagaagtcgaaggggttctgtctggcatcggaatgggccacgggcagagacacgttccggtactggtgcttggtggaccacttgaactcaggcacgaccattctaggcagctctgtgaagttctcgctccacaggctccgcaccatcaccagggcgttcagcaggtcaggggcgctgattttgaagtcgcagttaggtccgccgccctgggctctgctgtttctgtacacagggttgcagcactggaacacaataagagcagggtggtgcacgctggccagcacagacttgtcgctgatcaggtcggcgtcgagatcctcggcgttagacaaggcaaaaggggtcagcttgggcagctggcggcccaggaaaggggcgtggccgggcttgctattgcactcgcatctcagaggcatcagcaggtggccgtggccggtctgggcgttggggtacagggcctgcataaaggccttgatctgtttgaaggccacttgggccttggcgccttcggagaagaacatgccgcagcttttgccgctgaactggttggcggggcaggcggcgtcgtgcacacaacaccgggcgtcggtattgctgatctgcaccacgtttctgccccatctgttcttcacgatcttggccttgctgctctgctctttcagggccctctggccgttctcagaggtgacgtccatctcgatcacatgttccttgttgatcatgatgctgccgtgcagacacttcagctcgccctcgatttccgcgcatctgtgcagccacagggcacaaccggtaggctcgtggtgcttgtatgtcacctcagcaaaagattgcaggtaggcttgcaggaatctgcccatcatggtcacgaaggtcttgttggaggtaaaagtcagctgcagtcctctgtgttcctcgttcagccatgtcttgcacacggcggccagagcctcgacctgatctggcagcagcttgaaattagccttcaggtcgttgtccacgtgatacttatccatcagtgctctggcggcttccatgcccttctcccaggcggaaacgatgggcacgctcagggggttcatcacggtgatctcgctttcagcttctgaaggttcctcctcttcctcctgtgttctcatgccccgagccacggggtcgtcctcattcagtctccgcacggttctttttcctccctttccgtgcttaatcagtacaggaggattagagaagcccaccatctggagggcgacgtcctccctttcttcttcgctatccacgatcacttctgggctggggggccgttcaggctttgggctaggccgtttttttttcttcttaggggcgatagccagatcagcggcgcttgtagagggccgaggactaggggttctaggcacgagggcgtcctggctgctgtcctcctcatcctcgctctcgatccgtctccgcattctcttcttagggggggcccgcggagggggagggctagggctaggggacgacacatcttccatggttggaggtctgcgagcagcgcctctgcctctctctggtgttgtctcgcgctgttcttcctctctagaggccatttccttctcctataggcagaaaaagatcgttgaaactcactccggggctgtggacgtcggcttaccttcgcaaatttgtacctgaggactaccacgcccacgagattaggttctacgaagaccaatcccgcccgcctaatgcggagcttaccgcctgcgtcattacccagggccacattcttggccaattgcaagccatcaacaaagcccgccaagagtttctgctacgaaagggacggggggtttacttggacccccagtccggcgaggagctcaacccaatccccccgccgccgcagccctatcagcagcagccgcgggcccttgcttcccaggatggcacccaaaaagaagctgcagctgccgccgccacccacggacgaggaggaatactgggacagtcaggcagaggaggttttggacgaggaggaggaggacatgatggaagactgggagagcctagacgaggaagcttccgaggtcgaagaggtgtcagacgaaacaccgtcaccctcggtcgcattcccctcgccggcgccccagaaatcggcaaccggttccagcatggctacaacctccgctcctcaggcgccgccggcactgcccgttcgccgacccaaccgtagatgggacaccactggaaccagggccggtaagtccaagcagccgccgccgttagcccaagagcaacaacagcgccaaggctaccgctcatggcgcgggcacaagaacgccatagttgcttgcttgcaagactgtgggggcaacatctccttcgcccgccgctttcttctctaccatcacggcgtggccttcccccgtaacatcctgcattactaccgtcatctctacagcccatactgcaccggcggcagcggcagcaacagcagcggccacacagaagcaaaggcgaccggatagcaagactctgacaaagcccaagaaatccacagcggcggcagcagcaggaggaggagcgctgcgtctggcgcccaacgaacccgtatcgacccgcgagcttagaaacaggatttttcccactctgtatgctatatttcaacagagcaggggccaagaacaagagctgaaaataaaaaacaggtctctgcgatccctcacccgcagctgcctgtatcacaaaagcgaagatcagcttcggcgcacgctggaagacgcggaggctctcttcagtaaatactgcgcgctgactcttaaggactagtttcgcgccctttctcaaatttaagcgcgaaaactacgtcatctccagcggccacacccggcgccagcacctgttgtcagcgccattttttagggcggagtaacttgtatgtgttgggaattgtagttttcttaaaatgggaagtgacgtaacgtgggaaaacggaagtgacgatttgaggaagttgtgggttttttggctttcgtttctgggcgtaggttcgcgtgcggttttctgggtgttttttgtggactttaaccgttacgtcattttttagtcctatatatactcgctctgcacttggcccttttttacactgtgactgattgagctggtgccgtgtcgagtggtgtttttttaataggttttcttttttactggtaaggctgactgttatgactacgtccggcgttccatttggcatgacactacgaccaacacgatctcggttgtctcggcgcactccgtacagtagggatcgtctacctccttttgagacagaaacccgcgctaccatactggaggatcatccgctgctgcccgaatgtaacactttgacaatgcacaacgtgagttacgtgcgaggtcttccctgcagtgtgggatttacgctgattcaggaatgggttgttccctgggatatggttctaacgcgggaggagcttgtaatcctgaggaagtgtatgcacgtgtgcctgtgttgtgccaacattgatatcatgacgagcatgatgatccatggttacgagtcctgggctctccactgtcattgttccagtcccggttccctgcagtgtatagccggcgggcaggttttggccagctggtttaggatggtggtggatggcgccatgtttaatcagaggtttatatggtaccgggaggtggtgaattacaacatgccaaaagaggtaatgtttatgtccagcgtgtttatgaggggtcgccacttaatctacctgcgcttgtggtatgatggccacgtgggttctgtggtccccgccatgagctttggatacagcgccttgcactgtgggattttgaacaatattgtggtgctgtgctgcagttactgtgctgatttaagtgagatcagggtgcgctgctgtgcccggaggacaaggcgccttatgctgcgggcggtgcgaatcatcgctgaggagaccactgccatgttgtattcctgcaggacggagcggcggcggcagcagtttattcgcgcgctgctgcagcaccaccgccctatcctgatgcacgattatgactctacccccatgtaggcgtggacttctccttcgccgcccgttaagcaaccgcaagttggacagcagcctgtggctcagcagctggacagcgacatgaacttaagtgagctgcccggggagtttattaatatcactgatgagcgtttggctcgacaggaaaccgtgtggaatataacacctaagaatatgtctgttacccatgatatgatgctttttaaggccagccggggagaaaggactgtgtactctgtgtgttgggagggaggtggcaggttgaatactagggttctgtgagtttgattaaggtacggtgatctgtataagctatgtggtggtggggctatactactgaatgaaaaatgacttgaaattttctgcaattgaaaaataaacacgttgaaacataacacaaacgattctttattcttgggcaatgtatgaaaaagtgtaagaggatgtggcaaatatttcattaatgtagttgtggccagaccagtcccatgaaaatgacatagagtatgcacttggagttgtgtctcctgtttcctgtgtaccgtttagtgtaatggttagtgttacaggtttagttttgtctccgtttaagtaaacttgactgacaatgttacttttggcagttttaccgtgagattttggataagctgataggttaggcataaatccaacagcgtttgtataggctgtcgcccctcctgacgcggtaggaggaggggagggtgccctgcatgtctgccgctgctcttgctcttgccgctgctgaggaggggggcgcatctgccgcagcaccggatgcatctgggaaaagcaaaaaaggggctcgtccctgtttccggaggaatttgcaagcggggtcttgcatgacggggaggcaaacccccgttcgccgcagtccggccggtccgagactcgaaccgggggtcccgcgactcaacccttggaaaataaccctccggctacagggagcgagccacttaatgctttcgctttccagcctaaccgcttacgctgcgcgcggccagtggccaaaaaagctagcgcagcagccgccgcgcctggaaggaagccaaaaggagcactcccccgttgtctgacgtcgcacacctgggttcgacacgcgggcggtaaccgcatggatcacggcggacggccggatacggggctcgaaccccggtcgtccgccatgatacccttgcgaatttatccaccagaccacggaagagtgcccgcttacaggctctccttttgcacggtctagagcgtcaacgattgcgcgcgcctgaccggccagagcgtcccgaccatggagcactttttgccgctgcgcaacatctggaaccgcgtccgcgactttccgcgcgcctccaccaccgccgccggcatcacctggatgtccaggtacatctacggata

SEQ ID NO: 234 - DNA, 12582 bp, synthetic construct
  source 1..12582: mol_type = other DNA
tcgcgcgtttcggtgatgacggtgaaaacctctgacacatgcagctcccggagacggtcacagcttgtctgtaagcggatgccgggagcagacaagcccgtcagggcgcgtcagcgggtgttggcgggtgtcggggctggcttaactatgcggcatcagagcagattgtactgagagtgcaccatatgcggtgtgaaataccgcacagatgcgtaaggagaaaataccgcatcaggcgccattcgccattcaggctgcgcaactgttgggaagggcgatcggtgcgggcctcttcgctattacgccagctggcgaaagggggatgtgctgcaaggcgattaagttgggtaacgccagggttttcccagtcacgacgttgtaaaacgacggccagagaattccgcagggtctccattttgaagcgggaggtttgaacgcgcagccgccatgccggggttttacgagattgtgattaaggtccccagcgaccttgacgagcatctgcccggcatttctgacagctttgtgaactgggtggccgagaaggaatgggagttgccgccagattctgacatggatctgaatctgattgagcaggcacccctgaccgtggccgagaagctgcagcgcgactttctgacggaatggcgccgtgtgagtaaggccccggaggctcttttctttgtgcaatttgagaagggagagagctacttccacatgcacgtgctcgtggaaaccaccggggtgaaatccatggttttgggacgtttcctgagtcagattcgcgaaaaactgattcagagaatttaccgcgggatcgagccgactttgccaaactggttcgcggtcacaaagaccagaaatggcgccggaggcgggaacaaggtggtggatgagtgctacatccccaattacttgctccccaaaacccagcctgagctccagtgggcgtggactaatatggaacagtatttaagcgcctgtttgaatctcacggagcgtaaacggttggtggcgcagcatctgacgcacgtgtcgcagacgcaggagcagaacaaagagaatcagaatcccaattctgatgcgccggtgatcagatcaaaaacttcagccaggtacatggagctggtcgggtggctcgtggacaaggggattacctcggagaagcagtggatccaggaggaccaggcctcatacatctccttcaatgcggcctccaactcgcggtcccaaatcaaggctgccttggacaatgcgggaaagattatgagcctgactaaaaccgcccccgactacctggtgggccagcagcccgtggaggacatttccagcaatcggatttataaaattttggaactaaacgggtacgatccccaatatgcggcttccgtctttctgggatgggccacgaaaaagttcggcaagaggaacaccatctggctgtttgggcctgcaactaccgggaagaccaacatcgcggaggccatagcccacactgtgcccttctacgggtgcgtaaactggaccaatgagaactttcccttcaacgactgtgtcgacaagatggtgatctggtgggaggaggggaagatgaccgccaaggtcgtggagtcggccaaagccattctcggaggaagcaaggtgcgcgtggaccagaaatgcaagtcctcggcccagatagacccgactcccgtgatcgtcacctccaacaccaacatgtgcgccgtgattgacgggaactcaacgaccttcgaacaccagcagccgttgcaagaccggatgttcaaatttgaactcacccgccgtctggatcatgactttgggaaggtcaccaagcaggaagtcaaagactttttccggtgggcaaaggatcacgtggttgaggtggagcatgaattctacgtcaaaaagggtggagccaagaaaagacccgcccccagtgacgcagatataagtgagcccaaacgggtgcgcgagtcagttgcgcagccatcgacgtcagacgcggaagcttcgatcaactacgcagacaggtaccaaaacaaatgttctcgtcacgtgggcatgaatctgatgctgtttccctgcagacaatgcgagagaatgaatcagaattcaaatatctgcttcactcacggacagaaagactgtttagagtgctttcccgtgtcagaatctcaacccgtttctgtcgtcaaaaaggcgtatcagaaactgtgctacattcatcatatcatgggaaaggtgccagacgcttgcactgcctgcgatctggtcaatgtggatttggatgactgcatctttgaacaataaatgatttaaatcaggtatggctgccgatggttatcttccagattggctcgaggacaaccttagtgaaggaattcgcgagtggtgggctttgaaacctggagcccctcaacccaaggcaaatcaacaacatcaagacaacgctcgaggtcttgtgcttccgggttacaaataccttggacccggcaacggactcgacaagggggagccggtcaacgcagcagacgcggcggccctcgagcacgacaaggcctacgaccagcagctcaaggccggagacaacccgtacctcaagtacaaccacgccgacgccgagttccaggagcggctgaaagaagatacgtcttttgggggcaacctcgggcgagcagtcttccaggccaaaaagaggcttcttgaacctcttggtctggttgaggaagcggctaagacggctcctggaaagaagaggcctgtagagcagtctcctcaggaaccggactcctccgcgggtattggcaaatcgggtgcacagcccgctaaaaagagactcaatttcggtcagactggcgacacagagtcagtcccagaccctcaaccaatcggagaacctcccgcagccccctcaggtgtgggatctcttacaatggcttcaggtggtggcgcaccagtggcagacaataacgaaggtgccgatggagtgggtagttcctcgggaaattggcattgcgattcccaatggctgggggacagagtcatcaccaccagcacccgaacctgggccctgcccacctacaacaatcacctctacaagcaaatctccaacagcacatctggaggatcttcaaatgacaacgcctacttcggctacagcaccccctgggggtattttgacttcaacagattccactgccacttctcaccacgtgactggcagcgactcatcaacaacaactggggattccggcctaagcgactcaacttcaagctcttcaacattcaggtcaaagaggttacggacaacaatggagtcaagaccatcgccaataaccttaccagcacggtccaggtcttcacggactcagactatcagctcccgtacgtgctcgggtcggctcacgagggctgcctcccgccgttcccagcggacgttttcatgattcctcagtacgggtatctgacgcttaatgatggaagccaggccgtgggtcgttcgtccttttactgcctggaatatttcccgtcgcaaatgctaagaacgggtaacaacttccagttcagctacgagtttgagaacgtacctttccatagcagctacgctcacagccaaagcctggaccgactaatgaatccactcatcgaccaatacttgtactatctctcaaagactattaacggttctggacagaatcaacaaacgctaaaattcagtgtggccggacccagcaacatggctgtccagggaagaaactacatacctggacccagctaccgacaacaacgtgtctcaaccactgtgactcaaaacaacaacagcgaatttgcttggcctggagcttcttcttgggctctcaatggacgtaatagcttgatgaatcctggacctgctatggccagccacaaagaaggagaggaccgtttctttcctttgtctggatctttaatttttggcaaacaaggaactggaagagacaacgtggatgcggacaaagtcatgataaccaacgaagaagaaattaaaactactaacccggtagcaacggagtcctatggacaagtggccacaaaccaccagagtgcccaagcacaggcgcagaccggctgggttcaaaaccaaggaatacttccgggtatggtttggcaggacagagatgtgtacctgcaaggacccatttgggccaaaattcctcacacggacggcaactttcacccttctccgctgatgggagggtttggaatgaagcacccgcctcctcagatcctcatcaaaaacacacctgtacctgcggatcctccaacggccttcaacaaggacaagctgaactctttcatcacccagtattctactggccaagtcagcgtggagatcgagtgggagctgcagaaggaaaacagcaagcgctggaacccggagatccagtacacttccaactattacaagtctaataatgttgaatttgctgttaatactgaaggtgtatatagtgaaccccgccccattggcaccagatacctgactcgtaatctgtaattgcctgttaatcaataaaccggttgattcgtttcagttgaactttggtctctgcgaagggcgaattcgtttaaacctgcaggactagagccgaattctgcatcgcgatagggataacagggtaataaataatgtactagagacactttcaataaaggcaaatgcttttatttgtacactctcgggtgattatttacccccacccttgccgtctgcgccgttcagaagtcgaaggggttctgtctggcatcggaatgggccacgggcagagacacgttccggtactggtgcttggtggaccacttgaactcaggcacgaccattctaggcagctctgtgaagttctcgctccacaggctccgcaccatcaccagggcgttcagcaggtcaggggcgctgattttgaagtcgcagttaggtccgccgccctgggctctgctgtttctgtacacagggttgcagcactggaacacaataagagcagggtggtgcacgctggccagcacagacttgtcgctgatcaggtcggcgtcgagatcctcggcgttagacaaggcaaaaggggtcagcttgggcagctggcggcccaggaaaggggcgtggccgggcttgctattgcactcgcatctcagaggcatcagcaggtggccgtggccggtctgggcgttggggtacagggcctgcataaaggccttgatctgtttgaaggccacttgggccttggcgccttcggagaagaacatgccgcagcttttgccgctgaactggttggcggggcaggcggcgtcgtgcacacaacaccgggcgtcggtattgctgatctgcaccacgtttctgccccatctgttcttcacgatcttggccttgctgctctgctctttcagggccctctggccgttctcagaggtgacgtccatctcgatcacatgttccttgttgatcatgatgctgccgtgcagacacttcagctcgccctcgatttccgcgcatctgtgcagccacagggcacaaccggtaggctcgtggtgcttgtatgtcacctcagcaaaagattgcaggtaggcttgcaggaatctgcccatcatggtcacgaaggtcttgttggaggtaaaagtcagctgcagtcctctgtgttcctcgttcagccatgtcttgcacacggcggccagagcctcgacctgatctggcagcagcttgaaattagccttcaggtcgttgtccacgtgatacttatccatcagtgctctggcggcttccatgcccttctcccaggcggaaacgatgggcacgctcagggggttcatcacggtgatctcgctttcagcttctgaaggttcctcctcttcctcctgtgttctcatgccccgagccacggggtcgtcctcattcagtctccgcacggttctttttcctccctttccgtgcttaatcagtacaggaggattagagaagcccaccatctggagggcgacgtcctccctttcttcttcgctatccacgatcacttctgggctggggggccgttcaggctttgggctaggccgtttttttttcttcttaggggcgatagccagatcagcggcgcttgtagagggccgaggactaggggttctaggcacgagggcgtcctggctgctgtcctcctcatcctcgctctcgatccgtctccgcattctcttcttagggggggcccgcggagggggagggctagggctaggggacgacacatcttccatggttggaggtctgcgagcagcgcctctgcctctctctggtgttgtctcgcgctgttcttcctctctagaggccatttccttctcctataggcagaaaaagatcgttgaaactcactccggggctgtggacgtcggcttaccttcgcaaatttgtacctgaggactaccacgcccacgagattaggttctacgaagaccaatcccgcccgcctaatgcggagcttaccgcctgcgtcattacccagggccacattcttggccaattgcaagccatcaacaaagcccgccaagagtttctgctacgaaagggacggggggtttacttggacccccagtccggcgaggagctcaacccaatccccccgccgccgcagccctatcagcagcagccgcgggcccttgcttcccaggatggcacccaaaaagaagctgcagctgccgccgccacccacggacgaggaggaatactgggacagtcaggcagaggaggttttggacgaggaggaggaggacatgatggaagactgggagagcctagacgaggaagcttccgaggtcgaagaggtgtcagacgaaacaccgtcaccctcggtcgcattcccctcgccggcgccccagaaatcggcaaccggttccagcatggctacaacctccgctcctcaggcgccgccggcactgcccgttcgccgacccaaccgtagatgggacaccactggaaccagggccggtaagtccaagcagccgccgccgttagcccaagagcaacaacagcgccaaggctaccgctcatggcgcgggcacaagaacgccatagttgcttgcttgcaagactgtgggggcaacatctccttcgcccgccgctttcttctctaccatcacggcgtggccttcccccgtaacatcctgcattactaccgtcatctctacagcccatactgcaccggcggcagcggcagcaacagcagcggccacacagaagcaaaggcgaccggatagcaagactctgacaaagcccaagaaatccacagcggcggcagcagcaggaggaggagcgctgcgtctggcgcccaacgaacccgtatcgacccgcgagcttagaaacaggatttttcccactctgtatgctatatttcaacagagcaggggccaagaacaagagctgaaaataaaaaacaggtctctgcgatccctcacccgcagctgcctgtatcacaaaagcgaagatcagcttcggcgcacgctggaagacgcggaggctctcttcagtaaatactgcgcgctgactcttaaggactagtttcgcgccctttctcaaatttaagcgcgaaaactacgtcatctccagcggccacacccggcgccagcacctgttgtcagcgccattttttagggcggagtaacttgtatgtgttgggaattgtagttttcttaaaatgggaagtgacgtaacgtgggaaaacggaagtgacgatttgaggaagttgtgggttttttggctttcgtttctgggcgtaggttcgcgtgcggttttctgggtgttttttgtggactttaaccgttacgtcattttttagtcctatatatactcgctctgcacttggcccttttttacactgtgactgattgagctggtgccgtgtcgagtggtgtttttttaataggttttcttttttactggtaaggctgactgttatgactacgtccggcgttccatttggcatgacactacgaccaacacgatctcggttgtctcggcgcactccgtacagtagggatcgtctacctccttttgagacagaaacccgcgctaccatactggaggatcatccgctgctgcccgaatgtaacactttgacaatgcacaacgtgagttacgtgcgaggtcttccctgcagtgtgggatttacgctgattcaggaatgggttgttccctgggatatggttctaacgcgggaggagcttgtaatcctgaggaagtgtatgcacgtgtgcctgtgttgtgccaacattgatatcatgacgagcatgatgatccatggttacgagtcctgggctctccactgtcattgttccagtcccggttccctgcagtgtatagccggcgggcaggttttggccagctggtttaggatggtggtggatggcgccatgtttaatcagaggtttatatggtaccgggaggtggtgaattacaacatgccaaaagaggtaatgtttatgtccagcgtgtttatgaggggtcgccacttaatctacctgcgcttgtggtatgatggccacgtgggttctgtggtccccgccatgagctttggatacagcgccttgcactgtgggattttgaacaatattgtggtgctgtgctgcagttactgtgctgatttaagtgagatcagggtgcgctgctgtgcccggaggacaaggcgccttatgctgcgggcggtgcgaatcatcgctgaggagaccactgccatgttgtattcctgcaggacggagcggcggcggcagcagtttattcgcgcgctgctgcagcaccaccgccctatcctgatgcacgattatgactctacccccatgtaggcgtggacttctccttcgccgcccgttaagcaaccgcaagttggacagcagcctgtggctcagcagctggacagcgacatgaacttaagtgagctgcccggggagtttattaatatcactgatgagcgtttggctcgacaggaaaccgtgtggaatataacacctaagaatatgtctgttacccatgatatgatgctttttaaggccagccggggagaaaggactgtgtactctgtgtgttgggagggaggtggcaggttgaatactagggttctgtgagtttgattaaggtacggtgatctgtataagctatgtggtggtggggctatactactgaatgaaaaatgacttgaaattttctgcaattgaaaaataaacacgttgaaacataacacaaacgattctttattcttgggcaatgtatgaaaaagtgtaagaggatgtggcaaatatttcattaatgtagttgtggccagaccagtcccatgaaaatgacatagagtatgcacttggagttgtgtctcctgtttcctgtgtaccgtttagtgtaatggttagtgttacaggtttagttttgtctccgtttaagtaaacttgactgacaatgttacttttggcagttttaccgtgagattttggataagctgataggttaggcataaatccaacagcgtttgtataggctgtcgcccctcctgacgcggtaggaggaggggagggtgccctgcatgtctgccgctgctcttgctcttgccgctgctgaggaggggggcgcatctgccgcagcaccggatgcatctgggaaaagcaaaaaaggggctcgtccctgtttccggaggaatttgcaagcggggtcttgcatgacggggaggcaaacccccgttcgccgcagtccggccggtccgagactcgaaccgggggtcccgcgactcaacccttggaaaataaccctccggctacagggagcgagccacttaatgctttcgctttccagcctaaccgcttacgctgcgcgcggccagtggccaaaaaagctagcgcagcagccgccgcgcctggaaggaagccaaaaggagcactcccccgttgtctgacgtcgcacacctgggttcgacacgcgggcggtaaccgcatggatcacggcggacggccggatacggggctcgaaccccggtcgtccgccatgatacccttgcgaatttatccaccagaccacggaagagtgcccgcttacaggctctccttttgcacggtctagagcgtcaacgattgcgcgcgcctgaccggccagagcgtcccgaccatggagcactttttgccgctgcgcaacatctggaaccgcgtccgcgactttccgcgcgcctccaccaccgccgccggcatcacctggatgtccaggtacatctacggatatggcaaacagctattatgggtattatgggtgcggccgcggatcccgggcccgtcgactgcagaggcctgcatgcaagcttggtgtaatcatggtcatagctgtttcctgtgtgaaattgttatccgctcacaattccacacaacatacgagccggaagcataaagtgtaaagcctggggtgcctaatgagtgagctaactcacattaattgcgttgcgctcactgcccgctttccagtcgggaaacctgtcgtgccagctgcattaatgaatcggccaacgcgcggggagaggcggtttgcgtattgggcgctcttccgcttcctcgctcactgactcgctgcgctcggtcgttcggctgcggcgagcggtatcagctcactcaaaggcggtaatacggttatccacagaatcaggggataacgcaggaaagaacatgtgagcaaaaggccagcaaaaggccaggaaccgtaaaaaggccgcgttgctggcgtttttccataggctccgcccccctgacgagcatcacaaaaatcgacgctcaagtcagaggtggcgaaacccgacaggactataaagataccaggcgtttccccctggaagctccctcgtgcgctctcctgttccgaccctgccgcttaccggatacctgtccgcctttctcccttcgggaagcgtggcgctttctcatagctcacgctgtaggtatctcagttcggtgtaggtcgttcgctccaagctgggctgtgtgcacgaaccccccgttcagcccgaccgctgcgccttatccggtaactatcgtcttgagtccaacccggtaagacacgacttatcgccactggcagcagccactggtaacaggattagcagagcgaggtatgtaggcggtgctacagagttcttgaagtggtggcctaactacggctacactagaagaacagtatttggtatctgcgctctgctgaagccagttaccttcggaaaaagagttggtagctcttgatccggcaaacaaaccaccgctggtagcggtggtttttttgtttgcaagcagcagattacgcgcagaaaaaaaggatctcaagaagatcctttgatcttttctacggggtctgacgctcagtggaacgaaaactcacgttaagggattttggtcatgagattatcaaaaaggatcttcacctagaaggtcctgtattagaggtcacgtgagtgttttgcgacattttgcgacaccatgtggtcacgctgggtatttaagcccgagtgagcacgcagggtctccattttgaagcgggaggtttgaacgcgcagccgccatccttttaaattaaaaatgaagttttaaatcaagcccaatctgaataatgttacaaccaattaaccaattctgattagaaaaactcatcgagcatcaaatgaaactgcaatttattcatatcaggattatcaataccatatttttgaaaaagccgtttctgtaatgaaggagaaaactcaccgaggcagttccataggatggcaagatcctggtatcggtctgcgattccgactcgtccaacatcaatacaacctattaatttcccctcgtcaaaaataaggttatcaagtgagaaatcaccatgagtgacgactgaatccggtgagaatggcaaaagtttatgcatttctttccagacttgttcaacaggccagccattacgctcgtcatcaaaatcactcgcatcaaccaaaccgttattcattcgtgattgcgcctgagcgagacgaaatacgcgatcgctgttaaaaggacaattacaaacaggaatcgaatgcaaccggcgcaggaacactgccagcgcatcaacaatattttcacctgaatcaggatattcttctaatacctggaatgctgtttttccggggatcgcagtggtgagtaaccatgcatcatcaggagtacggataaaatgcttgatggtcggaagaggcataaattccgtcagccagtttagtctgaccatctcatctgtaacatcattggcaacgctacctttgccatgtttcagaaacaactctggcgcatcgggcttcccatacaagcgatagattgtcgcacctgattgcccgacattatcgcgagcccatttatacccatataaatcagcatccatgttggaatttaatcgcggcctcgacgtttcccgttgaatatggctcataacaccccttgtattactgtttatgtaagcagacagttttattgttcatgatgatatatttttatcttgtgcaatgtaacatcagagattttgagacacgggccagagctgca

SEQ ID NO: 235 - DNA, 5505 bp, synthetic construct; identical to SEQ ID NO: 106
  source 1..5505: mol_type = other DNA

SEQ ID NO: 236 - DNA, 2208 bp, synthetic construct
  source 1..2208: mol_type = other DNA
atggctgccgatggttatcttccagattggctcgaggacaaccttagtgaaggaattcgcgagtggtgggctttgaaacctggagcccctcaacccaaggcaaatcaacaacatcaagacaacgctcgaggtcttgtgcttccgggttacaaataccttggacccggcaacggactcgacaagggggagccggtcaacgcagcagacgcggcggccctcgagcacgacaaggcctacgaccagcagctcaaggccggagacaacccgtacctcaagtacaaccacgccgacgccgagttccaggagcggctcaaagaagatacgtcttttgggggcaacctcgggctagcagtcttccaggccaaaaagaggcttcttgaacctcttggtctggttgaggaagcggctaagacggctcctggaaagaagaggcctgtagagcagtctcctcaggaaccggactcctccgcgggtattggcaaatcgggtgcacagcccgctaaaaagagactcaatttcggtcagactggcgacacagagtcagtcccagaccctcaaccaatcggagaacctcccgcagccccctcaggtgtgggatctcttacaatggcttcaggtggtggcgcaccagtggcagacaataacgaaggtgccgatggagtgggtagttcctcgggaaattggcattgcgattcccaatggctgggggacagagtcatcaccaccagcacccgaacctgggccctgcccacctacaacaatcacctctacaagcaaatctccaacagcacatctggaggatcttcaaatgacaacgcctacttcggctacagcaccccctgggggtattttgacttcaacagattccactgccacttctcaccacgtgactggcagcgactcatcaacaacaactggggattccggcctaagcgactcaacttcaagctcttcaacattcaggtcaaagaggttacggacaacaatggagtcaagaccatcgccaataaccttaccagcacggtccaggtcttcacggactcagactatcagctcccgtacgtgctcgggtcggctcacgagggctgcctcccgccgttcccagcggacgttttcatgattcctcagtacgggtatctgacgcttaatgatggaagccaggccgtgggtcgttcgtccttttactgcctggaatatttcccgtcgcaaatgctaagaacgggtaacaacttccagttcagctacgagtttgagaacgtacctttccatagcagctacgctcacagccaaagcctggaccgactaatgaatccactcatcgaccaatacttgtactatctctcaaagactattaacggttctggacagaatcaacaaacgctaaaattcagtgtggccggacccagcaacatggctgtccagggaagaaactacatacctggacccagctaccgacaacaacgtgtctcaaccactgtgactcaaaacaacaacagcgaatttgcttggcctggagcttcttcttgggctctcaatggacgtaatagcttgatgaatcctggacctgctatggccagccacaaagaaggagaggaccgtttctttcctttgtctggatctttaatttttggcaaacaaggaactggaagagacaacgtggatgcggacaaagtcatgataaccaacgaagaagaaattaaaactactaacccggtagcaacggagtcctatggacaagtggccacaaaccaccagagtgcccaagcacaggcgcagaccggctgggttcaaaaccaaggaatacttccgggtatggtttggcaggacagagatgtgtacctgcaaggacccatttgggccaaaattcctcacacggacggcaactttcacccttctccgctgatgggagggtttggaatgaagcacccgcctcctcagatcctcatcaaaaacacacctgtacctgcggatcctccaacggccttcaacaaggacaagctgaactctttcatcacccagtattctactggccaagtcagcgtggagatcgagtgggagctgcagaaggaaaacagcaagcgctggaacccggagatccagtacacttccaactattacaagtctaataatgttgaatttgctgttaatactgaaggtgtatatagtgaaccccgccccattggcaccagatacctgactcgtaatctg

SEQ ID NO: 237 - DNA, 4090 bp, synthetic construct
  source 1..4090: mol_type = other DNA
atgccggggttttacgagattgtgattaaggtccccagcgaccttgacgagcatctgcccggcatttctgacagctttgtgaactgggtggccgagaaggaatgggagttgccgccagattctgacatggatctgaatctgattgagcaggcacccctgaccgtggccgagaagctgcagcgcgactttctgacggaatggcgccgtgtgagtaaggccccggaggctcttttctttgtgcaatttgagaagggagagagctacttccacatgcacgtgctcgtggaaaccaccggggtgaaatccatggttttgggacgtttcctgagtcagattcgcgaaaaactgattcagagaatttaccgcgggatcgagccgactttgccaaactggttcgcggtcacaaagaccagaaatggcgccggaggcgggaacaaggtggtggatgagtgctacatccccaattacttgctccccaaaacccagcctgagctccagtgggcgtggactaatatggaacagtatttaagcgcctgtttgaatctcacggagcgtaaacggttggtggcgcagcatctgacgcacgtgtcgcagacgcaggagcagaacaaagagaatcagaatcccaattctgatgcgccggtgatcagatcaaaaacttcagccaggtacatggagctggtcgggtggctcgtggacaaggggattacctcggagaagcagtggatccaggaggaccaggcctcatacatctccttcaatgcggcctccaactcgcggtcccaaatcaaggctgccttggacaatgcgggaaagattatgagcctgactaaaaccgcccccgactacctggtgggccagcagcccgtggaggacatttccagcaatcggatttataaaattttggaactaaacgggtacgatccccaatatgcggcttccgtctttctgggatgggccacgaaaaagttcggcaagaggaacaccatctggctgtttgggcctgcaactaccgggaagaccaacatcgcggaggccatagcccacactgtgcccttctacgggtgcgtaaactggaccaatgagaactttcccttcaacgactgtgtcgacaagatggtgatctggtgggaggaggggaagatgaccgccaaggtcgtggagtcggccaaagccattctcggaggaagcaaggtgcgcgtggaccagaaatgcaagtcctcggcccagatagacccgactcccgtgatcgtcacctccaacaccaacatgtgcgccgtgattgacgggaactcaacgaccttcgaacaccagcagccgttgcaagaccggatgttcaaatttgaactcacccgccgtctggatcatgactttgggaaggtcaccaagcaggaagtcaaagactttttccggtgggcaaaggatcacgtggttgaggtggagcatgaattctacgtcaaaaagggtggagccaagaaaagacccgcccccagtgacgcagatataagtgagcccaaacgggtgcgcgagtcagttgcgcagccatcgacgtcagacgcggaagcttcgatcaactacgcagacaggtaccaaaacaaatgttctcgtcacgtgggcatgaatctgatgctgtttccctgcagacaatgcgagagaatgaatcagaattcaaatatctgcttcactcacggacagaaagactgtttagagtgctttcccgtgtcagaatctcaacccgtttctgtcgtcaaaaaggcgtatcagaaactgtgctacattcatcatatcatgggaaaggtgccagacgcttgcactgcctgcgatctggtcaatgtggatttggatgactgcatctttgaacaataaatgatttaaatcaggtatggctgccgatggttatcttccagattggctcgaggacaaccttagtgaaggaattcgcgagtggtgggctttgaaacctggagcccctcaacccaaggcaaatcaacaacatcaagacaacgctcgaggtcttgtgcttccgggttacaaataccttggacccggcaacggactcgacaagggggagccggtcaacgcagcagacgcggcggccctcgagcacgacaaggcctacgaccagcagctcaaggccggagacaacccgtacctcaagtacaaccacgccgacgccgagttccaggagcggctcaaagaagatacgtcttttgggggcaacctcgggctagcagtcttccaggccaaaaagaggcttcttgaacctcttggtctggttgaggaagcggctaagacggctcctggaaagaagaggcctgtagagcagtctcctcaggaaccggactcctccgcgggtattggcaaatcgggtgcacagcccgctaaaaagagactcaatttcggtcagactggcgacacagagtcagtcccagaccctcaaccaatcggagaacctcccgcagccccctcaggtgtgggatctcttacaatggcttcaggtggtggcgcaccagtggcagacaataacgaaggtgccgatggagtgggtagttcctcgggaaattggcattgcgattcccaatggctgggggacagagtcatcaccaccagcacccgaacctgggccctgcccacctacaacaatcacctctacaagcaaatctccaacagcacatctggaggatcttcaaatgacaacgcctacttcggctacagcaccccctgggggtattttgacttcaacagattccactgccacttctcaccacgtgactggcagcgactcatcaacaacaactggggattccggcctaagcgactcaacttcaagctcttcaacattcaggtcaaagaggttacggacaacaatggagtcaagaccatcgccaataaccttaccagcacggtccaggtcttcacggactcagactatcagctcccgtacgtgctcgggtcggctcacgagggctgcctcccgccgttcccagcggacgttttcatgattcctcagtacgggtatctgacgcttaatgatggaagccaggccgtgggtcgttcgtccttttactgcctggaatatttcccgtcgcaaatgctaagaacgggtaacaacttccagttcagctacgagtttgagaacgtacctttccatagcagctacgctcacagccaaagcctggaccgactaatgaatccactcatcgaccaatacttgtactatctctcaaagactattaacggttctggacagaatcaacaaacgctaaaattcagtgtggccggacccagcaacatggctgtccagggaagaaactacatacctggacccagctaccgacaacaacgtgtctcaaccactgtgactcaaaacaacaacagcgaatttgcttggcctggagcttcttcttgggctctcaatggacgtaatagcttgatgaatcctggacctgctatggccagccacaaagaaggagaggaccgtttctttcctttgtctggatctttaatttttggcaaacaaggaactggaagagacaacgtggatgcggacaaagtcatgataaccaacgaagaagaaattaaaactactaacccggtagcaacggagtcctatggacaagtggccacaaaccaccagagtgcccaagcacaggcgcagaccggctgggttcaaaaccaaggaatacttccgggtatggtttggcaggacagagatgtgtacctgcaaggacccatttgggccaaaattcctcacacggacggcaactttcacccttctccgctgatgggagggtttggaatgaagcacccgcctcctcagatcctcatcaaaaacacacctgtacctgcggatcctccaacggccttcaacaaggacaagctgaactctttcatcacccagtattctactggccaagtcagcgtggagatcgagtgggagctgcagaaggaaaacagcaagcgctggaacccggagatccagtacacttccaactattacaagtctaataatgttgaatttgctgttaatactgaaggtgtatatagtgaaccccgccccattggcaccagatacctgactcgtaatctg

SEQ ID NO: 238 - DNA, 9819 bp, synthetic construct
  source 1..9819: mol_type = other DNA
atgccggggttttacgagattgtgattaaggtccccagcgaccttgacgagcatctgcccggcatttctgacagctttgtgaactgggtggccgagaaggaatgggagttgccgccagattctgacatggatctgaatctgattgagcaggcacccctgaccgtggccgagaagctgcagcgcgactttctgacggaatggcgccgtgtgagtaaggccccggaggctcttttctttgtgcaatttgagaagggagagagctacttccacatgcacgtgctcgtggaaaccaccggggtgaaatccatggttttgggacgtttcctgagtcagattcgcgaaaaactgattcagagaatttaccgcgggatcgagccgactttgccaaactggttcgcggtcacaaagaccagaaatggcgccggaggcgggaacaaggtggtggatgagtgctacatccccaattacttgctccccaaaacccagcctgagctccagtgggcgtggactaatatggaacagtatttaagcgcctgtttgaatctcacggagcgtaaacggttggtggcgcagcatctgacgcacgtgtcgcagacgcaggagcagaacaaagagaatcagaatcccaattctgatgcgccggtgatcagatcaaaaacttcagccaggtacatggagctggtcgggtggctcgtggacaaggggattacctcggagaagcagtggatccaggaggaccaggcctcatacatctccttcaatgcggcctccaactcgcggtcccaaatcaaggctgccttggacaatgcgggaaagattatgagcctgactaaaaccgcccccgactacctggtgggccagcagcccgtggaggacatttccagcaatcggatttataaaattttggaactaaacgggtacgatccccaatatgcggcttccgtctttctgggatgggccacgaaaaagttcggcaagaggaacaccatctggctgtttgggcctgcaactaccgggaagaccaacatcgcggaggccatagcccacactgtgcccttctacgggtgcgtaaactggaccaatgagaactttcccttcaacgactgtgtcgacaagatggtgatctggtgggaggaggggaagatgaccgccaaggtcgtggagtcggccaaagccattctcggaggaagcaaggtgcgcgtggaccagaaatgcaagtcctcggcccagatagacccgactcccgtgatcgtcacctccaacaccaacatgtgcgccgtgattgacgggaactcaacgaccttcgaacaccagcagccgttgcaagaccggatgttcaaatttgaactcacccgccgtctggatcatgactttgggaaggtcaccaagcaggaagtcaaagactttttccggtgggcaaaggatcacgtggttgaggtggagcatgaattctacgtcaaaaagggtggagccaagaaaagacccgcccccagtgacgcagatataagtgagcccaaacgggtgcgcgagtcagttgcgcagccatcgacgtcagacgcggaagcttcgatcaactacgcagacaggtaccaaaacaaatgttctcgtcacgtgggcatgaatctgatgctgtttccctgcagacaatgcgagagaatgaatcagaattcaaatatctgcttcactcacggacagaaagactgtttagagtgctttcccgtgtcagaatctcaacccgtttctgtcgtcaaaaaggcgtatcagaaactgtgctacattcatcatatcatgggaaaggtgccagacgcttgcactgcctgcgatctggtcaatgtggatttggatgactgcatctttgaacaataaatgatttaaatcaggtatggctgccgatggttatcttccagattggctcgaggacaaccttagtgaaggaattcgcgagtggtgggctttgaaacctggagcccctcaacccaaggcaaatcaacaacatcaagacaacgctcgaggtcttgtgcttccgggttacaaataccttggacccggcaacggactcgacaagggggagccggtcaacgcagcagacgcggcggccctcgagcacgacaaggcctacgaccagcagctcaaggccggagacaacccgtacctcaagtacaaccacgccgacgccgagttccaggagcggctcaaagaagatacgtcttttgggggcaacctcgggctagcagtcttccaggccaaaaagaggcttcttgaacctcttggtctggttgaggaagcggctaagacggctcctggaaagaagaggcctgtagagcagtctcctcaggaaccggactcctccgcgggtattggcaaatcgggtgcacagcccgctaaaaagagactcaatttcggtcagactggcgacacagagtcagtcccagaccctcaaccaatcggagaacctcccgcagccccctcaggtgtgggatctcttacaatggcttcaggtggtggcgcaccagtggcagacaataacgaaggtgccgatggagtgggtagttcctcgggaaattggcattgcgattcccaatggctgggggacagagtcatcaccaccagcacccgaacctgggccctgcccacctacaacaatcacctctacaagcaaatctccaacagcacatctggaggatcttcaaatgacaacgcctacttcggctacagcaccccctgggggtattttgacttcaacagattccactgccacttctcaccacgtgactggcagcgactcatcaacaacaactggggattccggcctaagcgactcaacttcaagctcttcaacattcaggtcaaagaggttacggacaacaatggagtcaagaccatcgccaataaccttaccagcacggtccaggtcttcacggactcagactatcagctcccgtacgtgctcgggtcggctcacgagggctgcctcccgccgttcccagcggacgttttcatgattcctcagtacgggtatctgacgcttaatgatggaagccaggccgtgggtcgttcgtccttttactgcctggaatatttcccgtcgcaaatgctaagaacgggtaacaacttccagttcagctacgagtttgagaacgtacctttccatagcagctacgctcacagccaaagcctggaccgactaatgaatccactcatcgaccaatacttgtactatctctcaaagactattaacggttctggacagaatcaacaaacgctaaaattcagtgtggccggacccagcaacatggctgtccagggaagaaactacatacctggacccagctaccgacaacaacgtgtctcaaccactgtgactcaaaacaacaacagcgaatttgcttggcctggagcttcttcttgggctctcaatggacgtaatagcttgatgaatcctggacctgctatggccagccacaaagaaggagaggaccgtttctttcctttgtctggatctttaatttttggcaaacaaggaactggaagagacaacgtggatgcggacaaagtcatgataaccaacgaagaagaaattaaaactactaacccggtagcaacggagtcctatggacaagtggccacaaaccaccagagtgcccaagcacaggcgcagaccggctgggttcaaaaccaaggaatacttccgggtatggtttggcaggacagagatgtgtacctgcaaggacccatttgggccaaaattcctcacacggacggcaactttcacccttctccgctgatgggagggtttggaatgaagcacccgcctcctcagatcctcatcaaaaacacacctgtacctgcggatcctccaacggccttcaacaaggacaagctgaactctttcatcacccagtattctactggccaagtcagcgtggagatcgagtgggagctgcagaaggaaaacagcaagcgctggaacccggagatccagtacacttccaactattacaagtctaataatgttgaatttgctgttaatactgaaggtgtatatagtgaaccccgccccattggcaccagatacctgactcgtaatctgtaattgcctgttaatcaataaaccggttgattcgtttcagttgaactttggtctctgcgaagggcgaattcgtttaaacctgcaggactagagccgaattctgcatcgcgatagggataacagggtaataaataatgtactagagacactttcaataaaggcaaatgcttttatttgtacactctcgggtgattatttacccccacccttgccgtctgcgccgttcagaagtcgaaggggttctgtctggcatcggaatgggccacgggcagagacacgttccggtactggtgcttggtggaccacttgaactcaggcacgaccattctaggcagctctgtgaagttctcgctccacaggctccgcaccatcaccagggcgttcagcaggtcaggggcgctgattttgaagtcgcagttaggtccgccgccctgggctctgctgtttctgtacacagggttgcagcactggaacacaataagagcagggtggtgcacgctggccagcacagacttgtcgctgatcaggtcggcgtcgagatcctcggcgttagacaaggcaaaaggggtcagcttgggcagctggcggcccaggaaaggggcgtggccgggcttgctattgcactcgcatctcagaggcatcagcaggtggccgtggccggtctgggcgttggggtacagggcctgcataaaggccttgatctgtttgaaggccacttgggccttggcgccttcggagaagaacatgccgcagcttttgccgctgaactggttggcggggcaggcggcgtcgtgcacacaacaccgggcgtcggtattgctgatctgcaccacgtttctgccccatctgttcttcacgatcttggccttgctgctctgctctttcagggccctctggccgttctcagaggtgacgtccatctcgatcacatgttccttgttgatcatgatgctgccgtgcagacacttcagctcgccctcgatttccgcgcatctgtgcagccacagggcacaaccggtaggctcgtggtgcttgtatgtcacctcagcaaaagattgcaggtaggcttgcaggaatctgcccatcatggtcacgaaggtcttgttggaggtaaaagtcagctgcagtcctctgtgttcctcgttcagccatgtcttgcacacggcggccagagcctcgacctgatctggcagcagcttgaaattagccttcaggtcgttgtccacgtgatacttatccatcagtgctctggcggcttccatgcccttctcccaggcggaaacgatgggcacgctcagggggttcatcacggtgatctcgctttcagcttctgaaggttcctcctcttcctcctgtgttctcatgccccgagccacggggtcgtcctcattcagtctccgcacggttctttttcctccctttccgtgcttaatcagtacaggaggattagagaagcccaccatctggagggcgacgtcctccctttcttcttcgctatccacgatcacttctgggctggggggccgttcaggctttgggctaggccgtttttttttcttcttaggggcgatagccagatcagcggcgcttgtagagggccgaggactaggggttctaggcacgagggcgtcctggctgctgtcctcctcatcctcgctctcgatccgtctccgcattctcttcttagggggggcccgcggagggggagggctagggctaggggacgacacatcttccatggttggaggtctgcgagcagcgcctctgcctctctctggtgttgtctcgcgctgttcttcctctctagaggccatttccttctcctataggcagaaaaagatcgttgaaactcactccggggctgtggacgtcggcttaccttcgcaaatttgtacctgaggactaccacgcccacgagattaggttctacgaagaccaatcccgcccgcctaatgcggagcttaccgcctgcgtcattacccagggccacattcttggccaattgcaagccatcaacaaagcccgccaagagtttctgctacgaaagggacggggggtttacttggacccccagtccggcgaggagctcaacccaatccccccgccgccgcagccctatcagcagcagccgcgggcccttgcttcccaggatggcacccaaaaagaagctgcagctgccgccgccacccacggacgaggaggaatactgggacagtcaggcagaggaggttttggacgaggaggaggaggacatgatggaagactgggagagcctagacgaggaagcttccgaggtcgaagaggtgtcagacgaaacaccgtcaccctcggtcgcattcccctcgccggcgccccagaaatcggcaaccggttccagcatggctacaacctccgctcctcaggcgccgccggcactgcccgttcgccgacccaaccgtagatgggacaccactggaaccagggccggtaagtccaagcagccgccgccgttagcccaagagcaacaacagcgccaaggctaccgctcatggcgcgggcacaagaacgccatagttgcttgcttgcaagactgtgggggcaacatctccttcgcccgccgctttcttctctaccatcacggcgtggccttcccccgtaacatcctgcattactaccgtcatctctacagcccatactgcaccggcggcagcggcagcaacagcagcggccacacagaagcaaaggcgaccggatagcaagactctgacaaagcccaagaaatccacagcggcggcagcagcaggaggaggagcgctgcgtctggcgcccaacgaacccgtatcgacccgcgagcttagaaacaggatttttcccactctgtatgctatatttcaacagagcaggggccaagaacaagagctgaaaataaaaaacaggtctctgcgatccctcacccgcagctgcctgtatcacaaaagcgaagatcagcttcggcgcacgctggaagacgcggaggctctcttcagtaaatactgcgcgctgactcttaaggactagtttcgcgccctttctcaaatttaagcgcgaaaactacgtcatctccagcggccacacccggcgccagcacctgttgtcagcgccattttttagggcggagtaacttgtatgtgttgggaattgtagttttcttaaaatgggaagtgacgtaacgtgggaaaacggaagtgacgatttgaggaagttgtgggttttttggctttcgtttctgggcgtaggttcgcgtgcggttttctgggtgttttttgtggactttaaccgttacgtcattttttagtcctatatatactcgctctgcacttggcccttttttacactgtgactgattgagctggtgccgtgtcgagtggtgtttttttaataggttttcttttttactggtaaggctgactgttatgactacgtccggcgttccatttggcatgacactacgaccaacacgatctcggttgtctcggcgcactccgtacagtagggatcgtctacctccttttgagacagaaacccgcgctaccatactggaggatcatccgctgctgcccgaatgtaacactttgacaatgcacaacgtgagttacgtgcgaggtcttccctgcagtgtgggatttacgctgattcaggaatgggttgttccctgggatatggttctaacgcgggaggagcttgtaatcctgaggaagtgtatgcacgtgtgcctgtgttgtgccaacattgatatcatgacgagcatgatgatccatggttacgagtcctgggctctccactgtcattgttccagtcccggttccctgcagtgtatagccggcgggcaggttttggccagctggtttaggatggtggtggatggcgccatgtttaatcagaggtttatatggtaccgggaggtggtgaattacaacatgccaaaagaggtaatgtttatgtccagcgtgtttatgaggggtcgccacttaatctacctgcgcttgtggtatgatggccacgtgggttctgtggtccccgccatgagctttggatacagcgccttgcactgtgggattttgaacaatattgtggtgctgtgctgcagttactgtgctgatttaagtgagatcagggtgcgctgctgtgcccggaggacaaggcgccttatgctgcgggcggtgcgaatcatcgctgaggagaccactgccatgttgtattcctgcaggacggagcggcggcggcagcagtttattcgcgcgctgctgcagcaccaccgccctatcctgatgcacgattatgactctacccccatgtaggcgtggacttctccttcgccgcccgttaagcaaccgcaagttggacagcagcctgtggctcagcagctggacagcgacatgaacttaagtgagctgcccggggagtttattaatatcactgatgagcgtttggctcgacaggaaaccgtgtggaatataacacctaagaatatgtctgttacccatgatatgatgctttttaaggccagccggggagaaaggactgtgtactctgtgtgttgggagggaggtggcaggttgaatactagggttctgtgagtttgattaaggtacggtgatctgtataagctatgtggtggtggggctatactactgaatgaaaaatgacttgaaattttctgcaattgaaaaataaacacgttgaaacataacacaaacgattctttattcttgggcaatgtatgaaaaagtgtaagaggatgtggcaaatatttcattaatgtagttgtggccagaccagtcccatgaaaatgacatagagtatgcacttggagttgtgtctcctgtttcctgtgtaccgtttagtgtaatggttagtgttacaggtttagttttgtctccgtttaagtaaacttgactgacaatgttacttttggcagttttaccgtgagattttggataagctgataggttaggcataaatccaacagcgtttgtataggctgtcgcccctcctgacgcggtaggaggaggggagggtgccctgcatgtctgccgctgctcttgctcttgccgctgctgaggaggggggcgcatctgccgcagcaccggatgcatctgggaaaagcaaaaaaggggctcgtccctgtttccggaggaatttgcaagcggggtcttgcatgacggggaggcaaacccccgttcgccgcagtccggccggtccgagactcgaaccgggggtcccgcgactcaacccttggaaaataaccctccggctacagggagcgagccacttaatgctttcgctttccagcctaaccgcttacgctgcgcgcggccagtggccaaaaaagctagcgcagcagccgccgcgcctggaaggaagccaaaaggagcactcccccgttgtctgacgtcgcacacctgggttcgacacgcgggcggtaaccgcatggatcacggcggacggccggatacggggctcgaaccccggtcgtccgccatgatacccttgcgaatttatccaccagaccacggaagagtgcccgcttacaggctctccttttgcacggtctagagcgtcaacgattgcgcgcgcctgaccggccagagcgtcccgaccatggagcactttttgccgctgcgcaacatctggaaccgcgtccgcgactttccgcgcgcctccaccaccgccgccggcatcacctggatgtccaggtacatctacggata

SEQ ID NO: 239 - DNA, 12582 bp, synthetic construct
  source 1..12582: mol_type = other DNA
tcgcgcgtttcggtgatgacggtgaaaacctctgacacatgcagctcccggagacggtcacagcttgtctgtaagcggatgccgggagcagacaagcccgtcagggcgcgtcagcgggtgttggcgggtgtcggggctggcttaactatgcggcatcagagcagattgtactgagagtgcaccatatgcggtgtgaaataccgcacagatgcgtaaggagaaaataccgcatcaggcgccattcgccattcaggctgcgcaactgttgggaagggcgatcggtgcgggcctcttcgctattacgccagctggcgaaagggggatgtgctgcaaggcgattaagttgggtaacgccagggttttcccagtcacgacgttgtaaaacgacggccagagaattccgcagggtctccattttgaagcgggaggtttgaacgcgcagccgccatgccggggttttacgagattgtgattaaggtccccagcgaccttgacgagcatctgcccggcatttctgacagctttgtgaactgggtggccgagaaggaatgggagttgccgccagattctgacatggatctgaatctgattgagcaggcacccctgaccgtggccgagaagctgcagcgcgactttctgacggaatggcgccgtgtgagtaaggccccggaggctcttttctttgtgcaatttgagaagggagagagctacttccacatgcacgtgctcgtggaaaccaccggggtgaaatccatggttttgggacgtttcctgagtcagattcgcgaaaaactgattcagagaatttaccgcgggatcgagccgactttgccaaactggttcgcggtcacaaagaccagaaatggcgccggaggcgggaacaaggtggtggatgagtgctacatccccaattacttgctccccaaaacccagcctgagctccagtgggcgtggactaatatggaacagtatttaagcgcctgtttgaatctcacggagcgtaaacggttggtggcgcagcatctgacgcacgtgtcgcagacgcaggagcagaacaaagagaatcagaatcccaattctgatgcgccggtgatcagatcaaaaacttcagccaggtacatggagctggtcgggtggctcgtggacaaggggattacctcggagaagcagtggatccaggaggaccaggcctcatacatctccttcaatgcggcctccaactcgcggtcccaaatcaaggctgccttggacaatgcgggaaagattatgagcctgactaaaaccgcccccgactacctggtgggccagcagcccgtggaggacatttccagcaatcggatttataaaattttggaactaaacgggtacgatccccaatatgcggcttccgtctttctgggatgggccacgaaaaagttcggcaagaggaacaccatctggctgtttgggcctgcaactaccgggaagaccaacatcgcggaggccatagcccacactgtgcccttctacgggtgcgtaaactggaccaatgagaactttcccttcaacgactgtgtcgacaagatggtgatctggtgggaggaggggaagatgaccgccaaggtcgtggagtcggccaaagccattctcggaggaagcaaggtgcgcgtggaccagaaatgcaagtcctcggcccagatagacccgactcccgtgatcgtcacctccaacaccaacatgtgcgccgtgattgacgggaactcaacgaccttcgaacaccagcagccgttgcaagaccggatgttcaaatttgaactcacccgccgtctggatcatgactttgggaaggtcaccaagcaggaagtcaaagactttttccggtgggcaaaggatcacgtggttgaggtggagcatgaattctacgtcaaaaagggtggagccaagaaaagacccgcccccagtgacgcagatataagtgagcccaaacgggtgcgcgagtcagttgcgcagccatcgacgtcagacgcggaagcttcgatcaactacgcagacaggtaccaaaacaaatgttctcgtcacgtgggcatgaatctgatgctgtttccctgcagacaatgcgagagaatgaatcagaattcaaatatctgcttcactcacggacagaaagactgtttagagtgctttcccgtgtcagaatctcaacccgtttctgtcgtcaaaaaggcgtatcagaaactgtgctacattcatcatatcatgggaaaggtgccagacgcttgcactgcctgcgatctggtcaatgtggatttggatgactgcatctttgaacaataaatgatttaaatcaggtatggctgccgatggttatcttccagattggctcgaggacaaccttagtgaaggaattcgcgagtggtgggctttgaaacctggagcccctcaacccaaggcaaatcaacaacatcaagacaacgctcgaggtcttgtgcttccgggttacaaataccttggacccggcaacggactcgacaagggggagccggtcaacgcagcagacgcggcggccctcgagcacgacaaggcctacgaccagcagctcaaggccggagacaacccgtacctcaagtacaaccacgccgacgccgagttccaggagcggctcaaagaagatacgtcttttgggggcaacctcgggctagcagtcttccaggccaaaaagaggcttcttgaacctcttggtctggttgaggaagcggctaagacggctcctggaaagaagaggcctgtagagcagtctcctcaggaaccggactcctccgcgggtattggcaaatcgggtgcacagcccgctaaaaagagactcaatttcggtcagactggcgacacagagtcagtcccagaccctcaaccaatcggagaacctcccgcagccccctcaggtgtgggatctcttacaatggcttcaggtggtggcgcaccagtggcagacaataacgaaggtgccgatggagtgggtagttcctcgggaaattggcattgcgattcccaatggctgggggacagagtcatcaccaccagcacccgaacctgggccctgcccacctacaacaatcacctctacaagcaaatctccaacagcacatctggaggatcttcaaatgacaacgcctacttcggctacagcaccccctgggggtattttgacttcaacagattccactgccacttctcaccacgtgactggcagcgactcatcaacaacaactggggattccggcctaagcgactcaacttcaagctcttcaacattcaggtcaaagaggttacggacaacaatggagtcaagaccatcgccaataaccttaccagcacggtccaggtcttcacggactcagactatcagctcccgtacgtgctcgggtcggctcacgagggctgcctcccgccgttcccagcggacgttttcatgattcctcagtacgggtatctgacgcttaatgatggaagccaggccgtgggtcgttcgtccttttactgcctggaatatttcccgtcgcaaatgctaagaacgggtaacaacttccagttcagctacgagtttgagaacgtacctttccatagcagctacgctcacagccaaagcctggaccgactaatgaatccactcatcgaccaatacttgtactatctctcaaagactattaacggttctggacagaatcaacaaacgctaaaattcagtgtggccggacccagcaacatggctgtccagggaagaaactacatacctggacccagctaccgacaacaacgtgtctcaaccactgtgactcaaaacaacaacagcgaatttgcttggcctggagcttcttcttgggctctcaatggacgtaatagcttgatgaatcctggacctgctatggccagccacaaagaaggagaggaccgtttctttcctttgtctggatctttaatttttggcaaacaaggaactggaagagacaacgtggatgcggacaaagtcatgataaccaacgaagaagaaattaaaactactaacccggtagcaacggagtcctatggacaagtggccacaaaccaccagagtgcccaagcacaggcgcagaccggctgggttcaaaaccaaggaatacttccgggtatggtttggcaggacagagatgtgtacctgcaaggacccatttgggccaaaattcctcacacggacggcaactttcacccttctccgctgatgggagggtttggaatgaagcacccgcctcctcagatcctcatcaaaaacacacctgtacctgcggatcctccaacggccttcaacaaggacaagctgaactctttcatcacccagtattctactggccaagtcagcgtggagatcgagtgggagctgcagaaggaaaacagcaagcgctggaacccggagatccagtacacttccaactattacaagtctaataatgttgaatttgctgttaatactgaaggtgtatatagtgaaccccgccccattggcaccagatacctgactcgtaatctgtaattgcctgttaatcaataaaccggttgattcgtttcagttgaactttggtctctgcgaagggcgaattcgtttaaacctgcaggactagagccgaattctgcatcgcgatagggataacagggtaataaataatgtactagagacactttcaataaaggcaaatgcttttatttgtacactctcgggtgattatttacccccacccttgccgtctgcgccgttcagaagtcgaaggggttctgtctggcatcggaatgggccacgggcagagacacgttccggtactggtgcttggtggaccacttgaactcaggcacgaccattctaggcagctctgtgaagttctcgctccacaggctccgcaccatcaccagggcgttcagcaggtcaggggcgctgattttgaagtcgcagttaggtccgccgccctgggctctgctgtttctgtacacagggttgcagcactggaacacaataagagcagggtggtgcacgctggccagcacagacttgtcgctgatcaggtcggcgtcgagatcctcggcgttagacaaggcaaaaggggtcagcttgggcagctggcggcccaggaaaggggcgtggccgggcttgctattgcactcgcatctcagaggcatcagcaggtggccgtggccggtctgggcgttggggtacagggcctgcataaaggccttgatctgtttgaaggccacttgggccttggcgccttcggagaagaacatgccgcagcttttgccgctgaactggttggcggggcaggcggcgtcgtgcacacaacaccgggcgtcggtattgctgatctgcaccacgtttctgccccatctgttcttcacgatcttggccttgctgctctgctctttcagggccctctggccgttctcagaggtgacgtccatctcgatcacatgttccttgttgatcatgatgctgccgtgcagacacttcagctcgccctcgatttccgcgcatctgtgcagccacagggcacaaccggtaggctcgtggtgcttgtatgtcacctcagcaaaagattgcaggtaggcttgcaggaatctgcccatcatggtcacgaaggtcttgttggaggtaaaagtcagctgcagtcctctgtgttcctcgttcagccatgtcttgcacacggcggccagagcctcgacctgatctggcagcagcttgaaattagccttcaggtcgttgtccacgtgatacttatccatcagtgctctggcggcttccatgcccttctcccaggcggaaacgatgggcacgctcagggggttcatcacggtgatctcgctttcagcttctgaaggttcctcctcttcctcctgtgttctcatgccccgagccacggggtcgtcctcattcagtctccgcacggttctttttcctccctttccgtgcttaatcagtacaggaggattagagaagcccaccatctggagggcgacgtcctccctttcttcttcgctatccacgatcacttctgggctggggggccgttcaggctttgggctaggccgtttttttttcttcttaggggcgatagccagatcagcggcgcttgtagagggccgaggactaggggttctaggcacgagggcgtcctggctgctgtcctcctcatcctcgctctcgatccgtctccgcattctcttcttagggggggcccgcggagggggagggctagggctaggggacgacacatcttccatggttggaggtctgcgagcagcgcctctgcctctctctggtgttgtctcgcgctgttcttcctctctagaggccatttccttctcctataggcagaaaaagatcgttgaaactcactccggggctgtggacgtcggcttaccttcgcaaatttgtacctgaggactaccacgcccacgagattaggttctacgaagaccaatcccgcccgcctaatgcggagcttaccgcctgcgtcattacccagggccacattcttggccaattgcaagccatcaacaaagcccgccaagagtttctgctacgaaagggacggggggtttacttggacccccagtccggcgaggagctcaacccaatccccccgccgccgcagccctatcagcagcagccgcgggcccttgcttcccaggatggcacccaaaaagaagctgcagctgccgccgccacccacggacgaggaggaatactgggacagtcaggcagaggaggttttggacgaggaggaggaggacatgatggaagactgggagagcctagacgaggaagcttccgaggtcgaagaggtgtcagacgaaacaccgtcaccctcggtcgcattcccctcgccggcgccccagaaatcggcaaccggttccagcatggctacaacctccgctcctcaggcgccgccggcactgcccgttcgccgacccaaccgtagatgggacaccactggaaccagggccggtaagtccaagcagccgccgccgttagcccaagagcaacaacagcgccaaggctaccgctcatggcgcgggcacaagaacgccatagttgcttgcttgcaagactgtgggggcaacatctccttcgcccgccgctttcttctctaccatcacggcgtggccttcccccgtaacatcctgcattactaccgtcatctctacagcccatactgcaccggcggcagcggcagcaacagcagcggccacacagaagcaaaggcgaccggatagcaagactctgacaaagcccaagaaatccacagcggcggcagcagcaggaggaggagcgctgcgtctggcgcccaacgaacccgtatcgacccgcgagcttagaaacaggatttttcccactctgtatgctatatttcaacagagcaggggccaagaacaagagctgaaaataaaaaacaggtctctgcgatccctcacccgcagctgcctgtatcacaaaagcgaagatcagcttcggcgcacgctggaagacgcggaggctctcttcagtaaatactgcgcgctgactcttaaggactagtttcgcgccctttctcaaatttaagcgcgaaaactacgtcatctccagcggccacacccggcgccagcacctgttgtcagcgccattttttagggcggagtaacttgtatgtgttgggaattgtagttttcttaaaatgggaagtgacgtaacgtgggaaaacggaagtgacgatttgaggaagttgtgggttttttggctttcgtttctgggcgtaggttcgcgtgcggttttctgggtgttttttgtggactttaaccgttacgtcattttttagtcctatatatactcgctctgcacttggcccttttttacactgtgactgattgagctggtgccgtgtcgagtggtgtttttttaataggttttcttttttactggtaaggctgactgttatgactacgtccggcgttccatttggcatgacactacgaccaacacgatctcggttgtctcggcgcactccgtacagtagggatcgtctacctccttttgagacagaaacccgcgctaccatactggaggatcatccgctgctgcccgaatgtaacactttgacaatgcacaacgtgagttacgtgcgaggtcttccctgcagtgtgggatttacgctgattcaggaatgggttgttccctgggatatggttctaacgcgggaggagcttgtaatcctgaggaagtgtatgcacgtgtgcctgtgttgtgccaacattgatatcatgacgagcatgatgatccatggttacgagtcctgggctctccactgtcattgttccagtcccggttccctgcagtgtatagccggcgggcaggttttggccagctggtttaggatggtggtggatggcgccatgtttaatcagaggtttatatggtaccgggaggtggtgaattacaacatgccaaaagaggtaatgtttatgtccagcgtgtttatgaggggtcgccacttaatctacctgcgcttgtggtatgatggccacgtgggttctgtggtccccgccatgagctttggatacagcgccttgcactgtgggattttgaacaatattgtggtgctgtgctgcagttactgtgctgatttaagtgagatcagggtgcgctgctgtgcccggaggacaaggcgccttatgctgcgggcggtgcgaatcatcgctgaggagaccactgccatgttgtattcctgcaggacggagcggcggcggcagcagtttattcgcgcgctgctgcagcaccaccgccctatcctgatgcacgattatgactctacccccatgtaggcgtggacttctccttcgccgcccgttaagcaaccgcaagttggacagcagcctgtggctcagcagctggacagcgacatgaacttaagtgagctgcccggggagtttattaatatcactgatgagcgtttggctcgacaggaaaccgtgtggaatataacacctaagaatatgtctgttacccatgatatgatgctttttaaggccagccggggagaaaggactgtgtactctgtgtgttgggagggaggtggcaggttgaatactagggttctgtgagtttgattaaggtacggtgatctgtataagctatgtggtggtggggctatactactgaatgaaaaatgacttgaaattttctgcaattgaaaaataaacacgttgaaacataacacaaacgattctttattcttgggcaatgtatgaaaaagtgtaagaggatgtggcaaatatttcattaatgtagttgtggccagaccagtcccatgaaaatgacatagagtatgcacttggagttgtgtctcctgtttcctgtgtaccgtttagtgtaatggttagtgttacaggtttagttttgtctccgtttaagtaaacttgactgacaatgttacttttggcagttttaccgtgagattttggataagctgataggttaggcataaatccaacagcgtttgtataggctgtcgcccctcctgacgcggtaggaggaggggagggtgccctgcatgtctgccgctgctcttgctcttgccgctgctgaggaggggggcgcatctgccgcagcaccggatgcatctgggaaaagcaaaaaaggggctcgtccctgtttccggaggaatttgcaagcggggtcttgcatgacggggaggcaaacccccgttcgccgcagtccggccggtccgagactcgaaccgggggtcccgcgactcaacccttggaaaataaccctccggctacagggagcgagccacttaatgctttcgctttccagcctaaccgcttacgctgcgcgcggccagtggccaaaaaagctagcgcagcagccgccgcgcctggaaggaagccaaaaggagcactcccccgttgtctgacgtcgcacacctgggttcgacacgcgggcggtaaccgcatggatcacggcggacggccggatacggggctcgaaccccggtcgtccgccatgatacccttgcgaatttatccaccagaccacggaagagtgcccgcttacaggctctccttttgcacggtctagagcgtcaacgattgcgcgcgcctgaccggccagagcgtcccgaccatggagcactttttgccgctgcgcaacatctggaaccgcgtccgcgactttccgcgcgcctccaccaccgccgccggcatcacctggatgtccaggtacatctacggatatggcaaacagctattatgggtattatgggtgcggccgcggatcccgggcccgtcgactgcagaggcctgcatgcaagcttggtgtaatcatggtcatagctgtttcctgtgtgaaattgttatccgctcacaattccacacaacatacgagccggaagcataaagtgtaaagcctggggtgcctaatgagtgagctaactcacattaattgcgttgcgctcactgcccgctttccagtcgggaaacctgtcgtgccagctgcattaatgaatcggccaacgcgcggggagaggcggtttgcgtattgggcgctcttccgcttcctcgctcactgactcgctgcgctcggtcgttcggctgcggcgagcggtatcagctcactcaaaggcggtaatacggttatccacagaatcaggggataacgcaggaaagaacatgtgagcaaaaggccagcaaaaggccaggaaccgtaaaaaggccgcgttgctggcgtttttccataggctccgcccccctgacgagcatcacaaaaatcgacgctcaagtcagaggtggcgaaacccgacaggactataaagataccaggcgtttccccctggaagctccctcgtgcgctctcctgttccgaccctgccgcttaccggatacctgtccgcctttctcccttcgggaagcgtggcgctttctcatagctcacgctgtaggtatctcagttcggtgtaggtcgttcgctccaagctgggctgtgtgcacgaaccccccgttcagcccgaccgctgcgccttatccggtaactatcgtcttgagtccaacccggtaagacacgacttatcgccactggcagcagccactggtaacaggattagcagagcgaggtatgtaggcggtgctacagagttcttgaagtggtggcctaactacggctacactagaagaacagtatttggtatctgcgctctgctgaagccagttaccttcggaaaaagagttggtagctcttgatccggcaaacaaaccaccgctggtagcggtggtttttttgtttgcaagcagcagattacgcgcagaaaaaaaggatctcaagaagatcctttgatcttttctacggggtctgacgctcagtggaacgaaaactcacgttaagggattttggtcatgagattatcaaaaaggatcttcacctagaaggtcctgtattagaggtcacgtgagtgttttgcgacattttgcgacaccatgtggtcacgctgggtatttaagcccgagtgagcacgcagggtctccattttgaagcgggaggtttgaacgcgcagccgccatccttttaaattaaaaatgaagttttaaatcaagcccaatctgaataatgttacaaccaattaaccaattctgattagaaaaactcatcgagcatcaaatgaaactgcaatttattcatatcaggattatcaataccatatttttgaaaaagccgtttctgtaatgaaggagaaaactcaccgaggcagttccataggatggcaagatcctggtatcggtctgcgattccgactcgtccaacatcaatacaacctattaatttcccctcgtcaaaaataaggttatcaagtgagaaatcaccatgagtgacgactgaatccggtgagaatggcaaaagtttatgcatttctttccagacttgttcaacaggccagccattacgctcgtcatcaaaatcactcgcatcaaccaaaccgttattcattcgtgattgcgcctgagcgagacgaaatacgcgatcgctgttaaaaggacaattacaaacaggaatcgaatgcaaccggcgcaggaacactgccagcgcatcaacaatattttcacctgaatcaggatattcttctaatacctggaatgctgtttttccggggatcgcagtggtgagtaaccatgcatcatcaggagtacggataaaatgcttgatggtcggaagaggcataaattccgtcagccagtttagtctgaccatctcatctgtaacatcattggcaacgctacctttgccatgtttcagaaacaactctggcgcatcgggcttcccatacaagcgatagattgtcgcacctgattgcccgacattatcgcgagcccatttatacccatataaatcagcatccatgttggaatttaatcgcggcctcgacgtttcccgttgaatatggctcataacaccccttgtattactgtttatgtaagcagacagttttattgttcatgatgatatatttttatcttgtgcaatgtaacatcagagattttgagacacgggccagagctgca

SEQ ID NO: 240 - DNA, 5505 bp, synthetic construct; identical to SEQ ID NO: 106
  source 1..5505: mol_type = other DNA

SEQ ID NO: 241 - DNA, 2208 bp, synthetic construct
  source 1..2208: mol_type = other DNA
atggctgccgatggttatcttccagattggctcgaggacaaccttagtgaaggaattcgcgagtggtgggctttgaaacctggagcccctcaacccaaggcaaatcaacaacatcaagacaacgctcgaggtcttgtgcttccgggttacaaataccttggacccggcaacggactcgacaagggggagccggtcaacgcagcagacgcggcggccctcgagcacgacaaggcctacgaccagcagctcaaggccggagacaacccgtacctcaagtacaaccacgccgacgccgagttccaggagcggctcaaagaagatacgtcttttgggggcaacctcgggcgagcagtcttccaggccaaaaagaggcttctagaacctcttggtctggttgaggaagcggctaagacggctcctggaaagaagaggcctgtagagcagtctcctcaggaaccggactcctccgcgggtattggcaaatcgggtgcacagcccgctaaaaagagactcaatttcggtcagactggcgacacagagtcagtcccagaccctcaaccaatcggagaacctcccgcagccccctcaggtgtgggatctcttacaatggcttcaggtggtggcgcaccagtggcagacaataacgaaggtgccgatggagtgggtagttcctcgggaaattggcattgcgattcccaatggctgggggacagagtcatcaccaccagcacccgaacctgggccctgcccacctacaacaatcacctctacaagcaaatctccaacagcacatctggaggatcttcaaatgacaacgcctacttcggctacagcaccccctgggggtattttgacttcaacagattccactgccacttctcaccacgtgactggcagcgactcatcaacaacaactggggattccggcctaagcgactcaacttcaagctcttcaacattcaggtcaaagaggttacggacaacaatggagtcaagaccatcgccaataaccttaccagcacggtccaggtcttcacggactcagactatcagctcccgtacgtgctcgggtcggctcacgagggctgcctcccgccgttcccagcggacgttttcatgattcctcagtacgggtatctgacgcttaatgatggaagccaggccgtgggtcgttcgtccttttactgcctggaatatttcccgtcgcaaatgctaagaacgggtaacaacttccagttcagctacgagtttgagaacgtacctttccatagcagctacgctcacagccaaagcctggaccgactaatgaatccactcatcgaccaatacttgtactatctctcaaagactattaacggttctggacagaatcaacaaacgctaaaattcagtgtggccggacccagcaacatggctgtccagggaagaaactacatacctggacccagctaccgacaacaacgtgtctcaaccactgtgactcaaaacaacaacagcgaatttgcttggcctggagcttcttcttgggctctcaatggacgtaatagcttgatgaatcctggacctgctatggccagccacaaagaaggagaggaccgtttctttcctttgtctggatctttaatttttggcaaacaaggaactggaagagacaacgtggatgcggacaaagtcatgataaccaacgaagaagaaattaaaactactaacccggtagcaacggagtcctatggacaagtggccacaaaccaccagagtgcccaagcacaggcgcagaccggctgggttcaaaaccaaggaatacttccgggtatggtttggcaggacagagatgtgtacctgcaaggacccatttgggccaaaattcctcacacggacggcaactttcacccttctccgctgatgggagggtttggaatgaagcacccgcctcctcagatcctcatcaaaaacacacctgtacctgcggatcctccaacggccttcaacaaggacaagctgaactctttcatcacccagtattctactggccaagtcagcgtggagatcgagtgggagctgcagaaggaaaacagcaagcgctggaacccggagatccagtacacttccaactattacaagtctaataatgttgaatttgctgttaatactgaaggtgtatatagtgaaccccgccccattggcaccagatacctgactcgtaatctg

SEQ ID NO: 242 - DNA, 4090 bp, synthetic construct
  source 1..4090: mol_type = other DNA
atgccggggttttacgagattgtgattaaggtccccagcgaccttgacgagcatctgcccggcatttctgacagctttgtgaactgggtggccgagaaggaatgggagttgccgccagattctgacatggatctgaatctgattgagcaggcacccctgaccgtggccgagaagctgcagcgcgactttctgacggaatggcgccgtgtgagtaaggccccggaggctcttttctttgtgcaatttgagaagggagagagctacttccacatgcacgtgctcgtggaaaccaccggggtgaaatccatggttttgggacgtttcctgagtcagattcgcgaaaaactgattcagagaatttaccgcgggatcgagccgactttgccaaactggttcgcggtcacaaagaccagaaatggcgccggaggcgggaacaaggtggtggatgagtgctacatccccaattacttgctccccaaaacccagcctgagctccagtgggcgtggactaatatggaacagtatttaagcgcctgtttgaatctcacggagcgtaaacggttggtggcgcagcatctgacgcacgtgtcgcagacgcaggagcagaacaaagagaatcagaatcccaattctgatgcgccggtgatcagatcaaaaacttcagccaggtacatggagctggtcgggtggctcgtggacaaggggattacctcggagaagcagtggatccaggaggaccaggcctcatacatctccttcaatgcggcctccaactcgcggtcccaaatcaaggctgccttggacaatgcgggaaagattatgagcctgactaaaaccgcccccgactacctggtgggccagcagcccgtggaggacatttccagcaatcggatttataaaattttggaactaaacgggtacgatccccaatatgcggcttccgtctttctgggatgggccacgaaaaagttcggcaagaggaacaccatctggctgtttgggcctgcaactaccgggaagaccaacatcgcggaggccatagcccacactgtgcccttctacgggtgcgtaaactggaccaatgagaactttcccttcaacgactgtgtcgacaagatggtgatctggtgggaggaggggaagatgaccgccaaggtcgtggagtcggccaaagccattctcggaggaagcaaggtgcgcgtggaccagaaatgcaagtcctcggcccagatagacccgactcccgtgatcgtcacctccaacaccaacatgtgcgccgtgattgacgggaactcaacgaccttcgaacaccagcagccgttgcaagaccggatgttcaaatttgaactcacccgccgtctggatcatgactttgggaaggtcaccaagcaggaagtcaaagactttttccggtgggcaaaggatcacgtggttgaggtggagcatgaattctacgtcaaaaagggtggagccaagaaaagacccgcccccagtgacgcagatataagtgagcccaaacgggtgcgcgagtcagttgcgcagccatcgacgtcagacgcggaagcttcgatcaactacgcagacaggtaccaaaacaaatgttctcgtcacgtgggcatgaatctgatgctgtttccctgcagacaatgcgagagaatgaatcagaattcaaatatctgcttcactcacggacagaaagactgtttagagtgctttcccgtgtcagaatctcaacccgtttctgtcgtcaaaaaggcgtatcagaaactgtgctacattcatcatatcatgggaaaggtgccagacgcttgcactgcctgcgatctggtcaatgtggatttggatgactgcatctttgaacaataaatgatttaaatcaggtatggctgccgatggttatcttccagattggctcgaggacaaccttagtgaaggaattcgcgagtggtgggctttgaaacctggagcccctcaacccaaggcaaatcaacaacatcaagacaacgctcgaggtcttgtgcttccgggttacaaataccttggacccggcaacggactcgacaagggggagccggtcaacgcagcagacgcggcggccctcgagcacgacaaggcctacgaccagcagctcaaggccggagacaacccgtacctcaagtacaaccacgccgacgccgagttccaggagcggctcaaagaagatacgtcttttgggggcaacctcgggcgagcagtcttccaggccaaaaagaggcttctagaacctcttggtctggttgaggaagcggctaagacggctcctggaaagaagaggcctgtagagcagtctcctcaggaaccggactcctccgcgggtattggcaaatcgggtgcacagcccgctaaaaagagactcaatttcggtcagactggcgacacagagtcagtcccagaccctcaaccaatcggagaacctcccgcagccccctcaggtgtgggatctcttacaatggcttcaggtggtggcgcaccagtggcagacaataacgaaggtgccgatggagtgggtagttcctcgggaaattggcattgcgattcccaatggctgggggacagagtcatcaccaccagcacccgaacctgggccctgcccacctacaacaatcacctctacaagcaaatctccaacagcacatctggaggatcttcaaatgacaacgcctacttcggctacagcaccccctgggggtattttgacttcaacagattccactgccacttctcaccacgtgactggcagcgactcatcaacaacaactggggattccggcctaagcgactcaacttcaagctcttcaacattcaggtcaaagaggttacggacaacaatggagtcaagaccatcgccaataaccttaccagcacggtccaggtcttcacggactcagactatcagctcccgtacgtgctcgggtcggctcacgagggctgcctcccgccgttcccagcggacgttttcatgattcctcagtacgggtatctgacgcttaatgatggaagccaggccgtgggtcgttcgtccttttactgcctggaatatttcccgtcgcaaatgctaagaacgggtaacaacttccagttcagctacgagtttgagaacgtacctttccatagcagctacgctcacagccaaagcctggaccgactaatgaatccactcatcgaccaatacttgtactatctctcaaagactattaacggttctggacagaatcaacaaacgctaaaattcagtgtggccggacccagcaacatggctgtccagggaagaaactacatacctggacccagctaccgacaacaacgtgtctcaaccactgtgactcaaaacaacaacagcgaatttgcttggcctggagcttcttcttgggctctcaatggacgtaatagcttgatgaatcctggacctgctatggccagccacaaagaaggagaggaccgtttctttcctttgtctggatctttaatttttggcaaacaaggaactggaagagacaacgtggatgcggacaaagtcatgataaccaacgaagaagaaattaaaactactaacccggtagcaacggagtcctatggacaagtggccacaaaccaccagagtgcccaagcacaggcgcagaccggctgggttcaaaaccaaggaatacttccgggtatggtttggcaggacagagatgtgtacctgcaaggacccatttgggccaaaattcctcacacggacggcaactttcacccttctccgctgatgggagggtttggaatgaagcacccgcctcctcagatcctcatcaaaaacacacctgtacctgcggatcctccaacggccttcaacaaggacaagctgaactctttcatcacccagtattctactggccaagtcagcgtggagatcgagtgggagctgcagaaggaaaacagcaagcgctggaacccggagatccagtacacttccaactattacaagtctaataatgttgaatttgctgttaatactgaaggtgtatatagtgaaccccgccccattggcaccagatacctgactcgtaatctg

SEQ ID NO: 243 - DNA, 9819 bp, synthetic construct
  source 1..9819: mol_type = other DNA
atgccggggttttacgagattgtgattaaggtccccagcgaccttgacgagcatctgcccggcatttctgacagctttgtgaactgggtggccgagaaggaatgggagttgccgccagattctgacatggatctgaatctgattgagcaggcacccctgaccgtggccgagaagctgcagcgcgactttctgacggaatggcgccgtgtgagtaaggccccggaggctcttttctttgtgcaatttgagaagggagagagctacttccacatgcacgtgctcgtggaaaccaccggggtgaaatccatggttttgggacgtttcctgagtcagattcgcgaaaaactgattcagagaatttaccgcgggatcgagccgactttgccaaactggttcgcggtcacaaagaccagaaatggcgccggaggcgggaacaaggtggtggatgagtgctacatccccaattacttgctccccaaaacccagcctgagctccagtgggcgtggactaatatggaacagtatttaagcgcctgtttgaatctcacggagcgtaaacggttggtggcgcagcatctgacgcacgtgtcgcagacgcaggagcagaacaaagagaatcagaatcccaattctgatgcgccggtgatcagatcaaaaacttcagccaggtacatggagctggtcgggtggctcgtggacaaggggattacctcggagaagcagtggatccaggaggaccaggcctcatacatctccttcaatgcggcctccaactcgcggtcccaaatcaaggctgccttggacaatgcgggaaagattatgagcctgactaaaaccgcccccgactacctggtgggccagcagcccgtggaggacatttccagcaatcggatttataaaattttggaactaaacgggtacgatccccaatatgcggcttccgtctttctgggatgggccacgaaaaagttcggcaagaggaacaccatctggctgtttgggcctgcaactaccgggaagaccaacatcgcggaggccatagcccacactgtgcccttctacgggtgcgtaaactggaccaatgagaactttcccttcaacgactgtgtcgacaagatggtgatctggtgggaggaggggaagatgaccgccaaggtcgtggagtcggccaaagccattctcggaggaagcaaggtgcgcgtggaccagaaatgcaagtcctcggcccagatagacccgactcccgtgatcgtcacctccaacaccaacatgtgcgccgtgattgacgggaactcaacgaccttcgaacaccagcagccgttgcaagaccggatgttcaaatttgaactcacccgccgtctggatcatgactttgggaaggtcaccaagcaggaagtcaaagactttttccggtgggcaaaggatcacgtggttgaggtggagcatgaattctacgtcaaaaagggtggagccaagaaaagacccgcccccagtgacgcagatataagtgagcccaaacgggtgcgcgagtcagttgcgcagccatcgacgtcagacgcggaagcttcgatcaactacgcagacaggtaccaaaacaaatgttctcgtcacgtgggcatgaatctgatgctgtttccctgcagacaatgcgagagaatgaatcagaattcaaatatctgcttcactcacggacagaaagactgtttagagtgctttcccgtgtcagaatctcaacccgtttctgtcgtcaaaaaggcgtatcagaaactgtgctacattcatcatatcatgggaaaggtgccagacgcttgcactgcctgcgatctggtcaatgtggatttggatgactgcatctttgaacaataaatgatttaaatcaggtatggctgccgatggttatcttccagattggctcgaggacaaccttagtgaaggaattcgcgagtggtgggctttgaaacctggagcccctcaacccaaggcaaatcaacaacatcaagacaacgctcgaggtcttgtgcttccgggttacaaataccttggacccggcaacggactcgacaagggggagccggtcaacgcagcagacgcggcggccctcgagcacgacaaggcctacgaccagcagctcaaggccggagacaacccgtacctcaagtacaaccacgccgacgccgagttccaggagcggctcaaagaagatacgtcttttgggggcaacctcgggcgagcagtcttccaggccaaaaagaggcttctagaacctcttggtctggttgaggaagcggctaagacggctcctggaaagaagaggcctgtagagcagtctcctcaggaaccggactcctccgcgggtattggcaaatcgggtgcacagcccgctaaaaagagactcaatttcggtcagactggcgacacagagtcagtcccagaccctcaaccaatcggagaacctcccgcagccccctcaggtgtgggatctcttacaatggcttcaggtggtggcgcaccagtggcagacaataacgaaggtgccgatggagtgggtagttcctcgggaaattggcattgcgattcccaatggctgggggacagagtcatcaccaccagcacccgaacctgggccctgcccacctacaacaatcacctctacaagcaaatctccaacagcacatctggaggatcttcaaatgacaacgcctacttcggctacagcaccccctgggggtattttgacttcaacagattccactgccacttctcaccacgtgactggcagcgactcatcaacaacaactggggattccggcctaagcgactcaacttcaagctcttcaacattcaggtcaaagaggttacggacaacaatggagtcaagaccatcgccaataaccttaccagcacggtccaggtcttcacggactcagactatcagctcccgtacgtgctcgggtcggctcacgagggctgcctcccgccgttcccagcggacgttttcatgattcctcagtacgggtatctgacgcttaatgatggaagccaggccgtgggtcgttcgtccttttactgcctggaatatttcccgtcgcaaatgctaagaacgggtaacaacttccagttcagctacgagtttgagaacgtacctttccatagcagctacgctcacagccaaagcctggaccgactaatgaatccactcatcgaccaatacttgtactatctctcaaagactattaacggttctggacagaatcaacaaacgctaaaattcagtgtggccggacccagcaacatggctgtccagggaagaaactacatacctggacccagctaccgacaacaacgtgtctcaaccactgtgactcaaaacaacaacagcgaatttgcttggcctggagcttcttcttgggctctcaatggacgtaatagcttgatgaatcctggacctgctatggccagccacaaagaaggagaggaccgtttctttcctttgtctggatctttaatttttggcaaacaaggaactggaagagacaacgtggatgcggacaaagtcatgataaccaacgaagaagaaattaaaactactaacccggtagcaacggagtcctatggacaagtggccacaaaccaccagagtgcccaagcacaggcgcagaccggctgggttcaaaaccaaggaatacttccgggtatggtttggcaggacagagatgtgtacctgcaaggacccatttgggccaaaattcctcacacggacggcaactttcacccttctccgctgatgggagggtttggaatgaagcacccgcctcctcagatcctcatcaaaaacacacctgtacctgcggatcctccaacggccttcaacaaggacaagctgaactctttcatcacccagtattctactggccaagtcagcgtggagatcgagtgggagctgcagaaggaaaacagcaagcgctggaacccggagatccagtacacttccaactattacaagtctaataatgttgaatttgctgttaatactgaaggtgtatatagtgaaccccgccccattggcaccagatacctgactcgtaatctgtaattgcctgttaatcaataaaccggttgattcgtttcagttgaactttggtctctgcgaagggcgaattcgtttaaacctgcaggactagagccgaattctgcatcgcgatagggataacagggtaataaataatgtactagagacactttcaataaaggcaaatgcttttatttgtacactctcgggtgattatttacccccacccttgccgtctgcgccgttcagaagtcgaaggggttctgtctggcatcggaatgggccacgggcagagacacgttccggtactggtgcttggtggaccacttgaactcaggcacgaccattctaggcagctctgtgaagttctcgctccacaggctccgcaccatcaccagggcgttcagcaggtcaggggcgctgattttgaagtcgcagttaggtccgccgccctgggctctgctgtttctgtacacagggttgcagcactggaacacaataagagcagggtggtgcacgctggccagcacagacttgtcgctgatcaggtcggcgtcgagatcctcggcgttagacaaggcaaaaggggtcagcttgggcagctggcggcccaggaaaggggcgtggccgggcttgctattgcactcgcatctcagaggcatcagcaggtggccgtggccggtctgggcgttggggtacagggcctgcataaaggccttgatctgtttgaaggccacttgggccttggcgccttcggagaagaacatgccgcagcttttgccgctgaactggttggcggggcaggcggcgtcgtgcacacaacaccgggcgtcggtattgctgatctgcaccacgtttctgccccatctgttcttcacgatcttggccttgctgctctgctctttcagggccctctggccgttctcagaggtgacgtccatctcgatcacatgttccttgttgatcatgatgctgccgtgcagacacttcagctcgccctcgatttccgcgcatctgtgcagccacagggcacaaccggtaggctcgtggtgcttgtatgtcacctcagcaaaagattgcaggtaggcttgcaggaatctgcccatcatggtcacgaaggtcttgttggaggtaaaagtcagctgcagtcctctgtgttcctcgttcagccatgtcttgcacacggcggccagagcctcgacctgatctggcagcagcttgaaattagccttcaggtcgttgtccacgtgatacttatccatcagtgctctggcggcttccatgcccttctcccaggcggaaacgatgggcacgctcagggggttcatcacggtgatctcgctttcagcttctgaaggttcctcctcttcctcctgtgttctcatgccccgagccacggggtcgtcctcattcagtctccgcacggttctttttcctccctttccgtgcttaatcagtacaggaggattagagaagcccaccatctggagggcgacgtcctccctttcttcttcgctatccacgatcacttctgggctggggggccgttcaggctttgggctaggccgtttttttttcttcttaggggcgatagccagatcagcggcgcttgtagagggccgaggactaggggttctaggcacgagggcgtcctggctgctgtcctcctcatcctcgctctcgatccgtctccgcattctcttcttagggggggcccgcggagggggagggctagggctaggggacgacacatcttccatggttggaggtctgcgagcagcgcctctgcctctctctggtgttgtctcgcgctgttcttcctctctagaggccatttccttctcctataggcagaaaaagatcgttgaaactcactccggggctgtggacgtcggcttaccttcgcaaatttgtacctgaggactaccacgcccacgagattaggttctacgaagaccaatcccgcccgcctaatgcggagcttaccgcctgcgtcattacccagggccacattcttggccaattgcaagccatcaacaaagcccgccaagagtttctgctacgaaagggacggggggtttacttggacccccagtccggcgaggagctcaacccaatccccccgccgccgcagccctatcagcagcagccgcgggcccttgcttcccaggatggcacccaaaaagaagctgcagctgccgccgccacccacggacgaggaggaatactgggacagtcaggcagaggaggttttggacgaggaggaggaggacatgatggaagactgggagagcctagacgaggaagcttccgaggtcgaagaggtgtcagacgaaacaccgtcaccctcggtcgcattcccctcgccggcgccccagaaatcggcaaccggttccagcatggctacaacctccgctcctcaggcgccgccggcactgcccgttcgccgacccaaccgtagatgggacaccactggaaccagggccggtaagtccaagcagccgccgccgttagcccaagagcaacaacagcgccaaggctaccgctcatggcgcgggcacaagaacgccatagttgcttgcttgcaagactgtgggggcaacatctccttcgcccgccgctttcttctctaccatcacggcgtggccttcccccgtaacatcctgcattactaccgtcatctctacagcccatactgcaccggcggcagcggcagcaacagcagcggccacacagaagcaaaggcgaccggatagcaagactctgacaaagcccaagaaatccacagcggcggcagcagcaggaggaggagcgctgcgtctggcgcccaacgaacccgtatcgacccgcgagcttagaaacaggatttttcccactctgtatgctatatttcaacagagcaggggccaagaacaagagctgaaaataaaaaacaggtctctgcgatccctcacccgcagctgcctgtatcacaaaagcgaagatcagcttcggcgcacgctggaagacgcggaggctctcttcagtaaatactgcgcgctgactcttaaggactagtttcgcgccctttctcaaatttaagcgcgaaaactacgtcatctccagcggccacacccggcgccagcacctgttgtcagcgccattttttagggcggagtaacttgtatgtgttgggaattgtagttttcttaaaatgggaagtgacgtaacgtgggaaaacggaagtgacgatttgaggaagttgtgggttttttggctttcgtttctgggcgtaggttcgcgtgcggttttctgggtgttttttgtggactttaaccgttacgtcattttttagtcctatatatactcgctctgcacttggcccttttttacactgtgactgattgagctggtgccgtgtcgagtggtgtttttttaataggttttcttttttactggtaaggctgactgttatgactacgtccggcgttccatttggcatgacactacgaccaacacgatctcggttgtctcggcgcactccgtacagtagggatcgtctacctccttttgagacagaaacccgcgctaccatactggaggatcatccgctgctgcccgaatgtaacactttgacaatgcacaacgtgagttacgtgcgaggtcttccctgcagtgtgggatttacgctgattcaggaatgggttgttccctgggatatggttctaacgcgggaggagcttgtaatcctgaggaagtgtatgcacgtgtgcctgtgttgtgccaacattgatatcatgacgagcatgatgatccatggttacgagtcctgggctctccactgtcattgttccagtcccggttccctgcagtgtatagccggcgggcaggttttggccagctggtttaggatggtggtggatggcgccatgtttaatcagaggtttatatggtaccgggaggtggtgaattacaacatgccaaaagaggtaatgtttatgtccagcgtgtttatgaggggtcgccacttaatctacctgcgcttgtggtatgatggccacgtgggttctgtggtccccgccatgagctttggatacagcgccttgcactgtgggattttgaacaatattgtggtgctgtgctgcagttactgtgctgatttaagtgagatcagggtgcgctgctgtgcccggaggacaaggcgccttatgctgcgggcggtgcgaatcatcgctgaggagaccactgccatgttgtattcctgcaggacggagcggcggcggcagcagtttattcgcgcgctgctgcagcaccaccgccctatcctgatgcacgattatgactctacccccatgtaggcgtggacttctccttcgccgcccgttaagcaaccgcaagttggacagcagcctgtggctcagcagctggacagcgacatgaacttaagtgagctgcccggggagtttattaatatcactgatgagcgtttggctcgacaggaaaccgtgtggaatataacacctaagaatatgtctgttacccatgatatgatgctttttaaggccagccggggagaaaggactgtgtactctgtgtgttgggagggaggtggcaggttgaatactagggttctgtgagtttgattaaggtacggtgatctgtataagctatgtggtggtggggctatactactgaatgaaaaatgacttgaaattttctgcaattgaaaaataaacacgttgaaacataacacaaacgattctttattcttgggcaatgtatgaaaaagtgtaagaggatgtggcaaatatttcattaatgtagttgtggccagaccagtcccatgaaaatgacatagagtatgcacttggagttgtgtctcctgtttcctgtgtaccgtttagtgtaatggttagtgttacaggtttagttttgtctccgtttaagtaaacttgactgacaatgttacttttggcagttttaccgtgagattttggataagctgataggttaggcataaatccaacagcgtttgtataggctgtcgcccctcctgacgcggtaggaggaggggagggtgccctgcatgtctgccgctgctcttgctcttgccgctgctgaggaggggggcgcatctgccgcagcaccggatgcatctgggaaaagcaaaaaaggggctcgtccctgtttccggaggaatttgcaagcggggtcttgcatgacggggaggcaaacccccgttcgccgcagtccggccggtccgagactcgaaccgggggtcccgcgactcaacccttggaaaataaccctccggctacagggagcgagccacttaatgctttcgctttccagcctaaccgcttacgctgcgcgcggccagtggccaaaaaagctagcgcagcagccgccgcgcctggaaggaagccaaaaggagcactcccccgttgtctgacgtcgcacacctgggttcgacacgcgggcggtaaccgcatggatcacggcggacggccggatacggggctcgaaccccggtcgtccgccatgatacccttgcgaatttatccaccagaccacggaagagtgcccgcttacaggctctccttttgcacggtctagagcgtcaacgattgcgcgcgcctgaccggccagagcgtcccgaccatggagcactttttgccgctgcgcaacatctggaaccgcgtccgcgactttccgcgcgcctccaccaccgccgccggcatcacctggatgtccaggtacatctacggata

SEQ ID NO: 244 - DNA, 12582 bp, synthetic construct
  source 1..12582: mol_type = other DNA
tcgcgcgtttcggtgatgacggtgaaaacctctgacacatgcagctcccggagacggtcacagcttgtctgtaagcggatgccgggagcagacaagcccgtcagggcgcgtcagcgggtgttggcgggtgtcggggctggcttaactatgcggcatcagagcagattgtactgagagtgcaccatatgcggtgtgaaataccgcacagatgcgtaaggagaaaataccgcatcaggcgccattcgccattcaggctgcgcaactgttgggaagggcgatcggtgcgggcctcttcgctattacgccagctggcgaaagggggatgtgctgcaaggcgattaagttgggtaacgccagggttttcccagtcacgacgttgtaaaacgacggccagagaattccgcagggtctccattttgaagcgggaggtttgaacgcgcagccgccatgccggggttttacgagattgtgattaaggtccccagcgaccttgacgagcatctgcccggcatttctgacagctttgtgaactgggtggccgagaaggaatgggagttgccgccagattctgacatggatctgaatctgattgagcaggcacccctgaccgtggccgagaagctgcagcgcgactttctgacggaatggcgccgtgtgagtaaggccccggaggctcttttctttgtgcaatttgagaagggagagagctacttccacatgcacgtgctcgtggaaaccaccggggtgaaatccatggttttgggacgtttcctgagtcagattcgcgaaaaactgattcagagaatttaccgcgggatcgagccgactttgccaaactggttcgcggtcacaaagaccagaaatggcgccggaggcgggaacaaggtggtggatgagtgctacatccccaattacttgctccccaaaacccagcctgagctccagtgggcgtggactaatatggaacagtatttaagcgcctgtttgaatctcacggagcgtaaacggttggtggcgcagcatctgacgcacgtgtcgcagacgcaggagcagaacaaagagaatcagaatcccaattctgatgcgccggtgatcagatcaaaaacttcagccaggtacatggagctggtcgggtggctcgtggacaaggggattacctcggagaagcagtggatccaggaggaccaggcctcatacatctccttcaatgcggcctccaactcgcggtcccaaatcaaggctgccttggacaatgcgggaaagattatgagcctgactaaaaccgcccccgactacctggtgggccagcagcccgtggaggacatttccagcaatcggatttataaaattttggaactaaacgggtacgatccccaatatgcggcttccgtctttctgggatgggccacgaaaaagttcggcaagaggaacaccatctggctgtttgggcctgcaactaccgggaagaccaacatcgcggaggccatagcccacactgtgcccttctacgggtgcgtaaactggaccaatgagaactttcccttcaacgactgtgtcgacaagatggtgatctggtgggaggaggggaagatgaccgccaaggtcgtggagtcggccaaagccattctcggaggaagcaaggtgcgcgtggaccagaaatgcaagtcctcggcccagatagacccgactcccgtgatcgtcacctccaacaccaacatgtgcgccgtgattgacgggaactcaacgaccttcgaacaccagcagccgttgcaagaccggatgttcaaatttgaactcacccgccgtctggatcatgactttgggaaggtcaccaagcaggaagtcaaagactttttccggtgggcaaaggatcacgtggttgaggtggagcatgaattctacgtcaaaaagggtggagccaagaaaagacccgcccccagtgacgcagatataagtgagcccaaacgggtgcgcgagtcagttgcgcagccatcgacgtcagacgcggaagcttcgatcaactacgcagacaggtaccaaaacaaatgttctcgtcacgtgggcatgaatctgatgctgtttccctgcagacaatgcgagagaatgaatcagaattcaaatatctgcttcactcacggacagaaagactgtttagagtgctttcccgtgtcagaatctcaacccgtttctgtcgtcaaaaaggcgtatcagaaactgtgctacattcatcatatcatgggaaaggtgccagacgcttgcactgcctgcgatctggtcaatgtggatttggatgactgcatctttgaacaataaatgatttaaatcaggtatggctgccgatggttatcttccagattggctcgaggacaaccttagtgaaggaattcgcgagtggtgggctttgaaacctggagcccctcaacccaaggcaaatcaacaacatcaagacaacgctcgaggtcttgtgcttccgggttacaaataccttggacccggcaacggactcgacaagggggagccggtcaacgcagcagacgcggcggccctcgagcacgacaaggcctacgaccagcagctcaaggccggagacaacccgtacctcaagtacaaccacgccgacgccgagttccaggagcggctcaaagaagatacgtcttttgggggcaacctcgggcgagcagtcttccaggccaaaaagaggcttctagaacctcttggtctggttgaggaagcggctaagacggctcctggaaagaagaggcctgtagagcagtctcctcaggaaccggactcctccgcgggtattggcaaatcgggtgcacagcccgctaaaaagagactcaatttcggtcagactggcgacacagagtcagtcccagaccctcaaccaatcggagaacctcccgcagccccctcaggtgtgggatctcttacaatggcttcaggtggtggcgcaccagtggcagacaataacgaaggtgccgatggagtgggtagttcctcgggaaattggcattgcgattcccaatggctgggggacagagtcatcaccaccagcacccgaacctgggccctgcccacctacaacaatcacctctacaagcaaatctccaacagcacatctggaggatcttcaaatgacaacgcctacttcggctacagcaccccctgggggtattttgacttcaacagattccactgccacttctcaccacgtgactggcagcgactcatcaacaacaactggggattccggcctaagcgactcaacttcaagctcttcaacattcaggtcaaagaggttacggacaacaatggagtcaagaccatcgccaataaccttaccagcacggtccaggtcttcacggactcagactatcagctcccgtacgtgctcgggtcggctcacgagggctgcctcccgccgttcccagcggacgttttcatgattcctcagtacgggtatctgacgcttaatgatggaagccaggccgtgggtcgttcgtccttttactgcctggaatatttcccgtcgcaaatgctaagaacgggtaacaacttccagttcagctacgagtttgagaacgtacctttccatagcagctacgctcacagccaaagcctggaccgactaatgaatccactcatcgaccaatacttgtactatctctcaaagactattaacggttctggacagaatcaacaaacgctaaaattcagtgtggccggacccagcaacatggctgtccagggaagaaactacatacctggacccagctaccgacaacaacgtgtctcaaccactgtgactcaaaacaacaacagcgaatttgcttggcctggagcttcttcttgggctctcaatggacgtaatagcttgatgaatcctggacctgctatggccagccacaaagaaggagaggaccgtttctttcctttgtctggatctttaatttttggcaaacaaggaactggaagagacaacgtggatgcggacaaagtcatgataaccaacgaagaagaaattaaaactactaacccggtagcaacggagtcctatggacaagtggccacaaaccaccagagtgcccaagcacaggcgcagaccggctgggttcaaaaccaaggaatacttccgggtatggtttggcaggacagagatgtgtacctgcaaggacccatttgggccaaaattcctcacacggacggcaactttcacccttctccgctgatgggagggtttggaatgaagcacccgcctcctcagatcctcatcaaaaacacacctgtacctgcggatcctccaacggccttcaacaaggacaagctgaactctttcatcacccagtattctactggccaagtcagcgtggagatcgagtgggagctgcagaaggaaaacagcaagcgctggaacccggagatccagtacacttccaactattacaagtctaataatgttgaatttgctgttaatactgaaggtgtatatagtgaaccccgccccattggcaccagatacctgactcgtaatctgtaattgcctgttaatcaataaaccggttgattcgtttcagttgaactttggtctctgcgaagggcgaattcgtttaaacctgcaggactagagccgaattctgcatcgcgatagggataacagggtaataaataatgtactagagacactttcaataaaggcaaatgcttttatttgtacactctcgggtgattatttacccccacccttgccgtctgcgccgttcagaagtcgaaggggttctgtctggcatcggaatgggccacgggcagagacacgttccggtactggtgcttggtggaccacttgaactcaggcacgaccattctaggcagctctgtgaagttctcgctccacaggctccgcaccatcaccagggcgttcagcaggtcaggggcgctgattttgaagtcgcagttaggtccgccgccctgggctctgctgtttctgtacacagggttgcagcactggaacacaataagagcagggtggtgcacgctggccagcacagacttgtcgctgatcaggtcggcgtcgagatcctcggcgttagacaaggcaaaaggggtcagcttgggcagctggcggcccaggaaaggggcgtggccgggcttgctattgcactcgcatctcagaggcatcagcaggtggccgtggccggtctgggcgttggggtacagggcctgcataaaggccttgatctgtttgaaggccacttgggccttggcgccttcggagaagaacatgccgcagcttttgccgctgaactggttggcggggcaggcggcgtcgtgcacacaacaccgggcgtcggtattgctgatctgcaccacgtttctgccccatctgttcttcacgatcttggccttgctgctctgctctttcagggccctctggccgttctcagaggtgacgtccatctcgatcacatgttccttgttgatcatgatgctgccgtgcagacacttcagctcgccctcgatttccgcgcatctgtgcagccacagggcacaaccggtaggctcgtggtgcttgtatgtcacctcagcaaaagattgcaggtaggcttgcaggaatctgcccatcatggtcacgaaggtcttgttggaggtaaaagtcagctgcagtcctctgtgttcctcgttcagccatgtcttgcacacggcggccagagcctcgacctgatctggcagcagcttgaaattagccttcaggtcgttgtccacgtgatacttatccatcagtgctctggcggcttccatgcccttctcccaggcggaaacgatgggcacgctcagggggttcatcacggtgatctcgctttcagcttctgaaggttcctcctcttcctcctgtgttctcatgccccgagccacggggtcgtcctcattcagtctccgcacggttctttttcctccctttccgtgcttaatcagtacaggaggattagagaagcccaccatctggagggcgacgtcctccctttcttcttcgctatccacgatcacttctgggctggggggccgttcaggctttgggctaggccgtttttttttcttcttaggggcgatagccagatcagcggcgcttgtagagggccgaggactaggggttctaggcacgagggcgtcctggctgctgtcctcctcatcctcgctctcgatccgtctccgcattctcttcttagggggggcccgcggagggggagggctagggctaggggacgacacatcttccatggttggaggtctgcgagcagcgcctctgcctctctctggtgttgtctcgcgctgttcttcctctctagaggccatttccttctcctataggcagaaaaagatcgttgaaactcactccggggctgtggacgtcggcttaccttcgcaaatttgtacctgaggactaccacgcccacgagattaggttctacgaagaccaatcccgcccgcctaatgcggagcttaccgcctgcgtcattacccagggccacattcttggccaattgcaagccatcaacaaagcccgccaagagtttctgctacgaaagggacggggggtttacttggacccccagtccggcgaggagctcaacccaatccccccgccgccgcagccctatcagcagcagccgcgggcccttgcttcccaggatggcacccaaaaagaagctgcagctgccgccgccacccacggacgaggaggaatactgggacagtcaggcagaggaggttttggacgaggaggaggaggacatgatggaagactgggagagcctagacgaggaagcttccgaggtcgaagaggtgtcagacgaaacaccgtcaccctcggtcgcattcccctcgccggcgccccagaaatcggcaaccggttccagcatggctacaacctccgctcctcaggcgccgccggcactgcccgttcgccgacccaaccgtagatgggacaccactggaaccagggccggtaagtccaagcagccgccgccgttagcccaagagcaacaacagcgccaaggctaccgctcatggcgcgggcacaagaacgccatagttgcttgcttgcaagactgtgggggcaacatctccttcgcccgccgctttcttctctaccatcacggcgtggccttcccccgtaacatcctgcattactaccgtcatctctacagcccatactgcaccggcggcagcggcagcaacagcagcggccacacagaagcaaaggcgaccggatagcaagactctgacaaagcccaagaaatccacagcggcggcagcagcaggaggaggagcgctgcgtctggcgcccaacgaacccgtatcgacccgcgagcttagaaacaggatttttcccactctgtatgctatatttcaacagagcaggggccaagaacaagagctgaaaataaaaaacaggtctctgcgatccctcacccgcagctgcctgtatcacaaaagcgaagatcagcttcggcgcacgctggaagacgcggaggctctcttcagtaaatactgcgcgctgactcttaaggactagtttcgcgccctttctcaaatttaagcgcgaaaactacgtcatctccagcggccacacccggcgccagcacctgttgtcagcgccattttttagggcggagtaacttgtatgtgttgggaattgtagttttcttaaaatgggaagtgacgtaacgtgggaaaacggaagtgacgatttgaggaagttgtgggttttttggctttcgtttctgggcgtaggttcgcgtgcggttttctgggtgttttttgtggactttaaccgttacgtcattttttagtcctatatatactcgctctgcacttggcccttttttacactgtgactgattgagctggtgccgtgtcgagtggtgtttttttaataggttttcttttttactggtaaggctgactgttatgactacgtccggcgttccatttggcatgacactacgaccaacacgatctcggttgtctcggcgcactccgtacagtagggatcgtctacctccttttgagacagaaacccgcgctaccatactggaggatcatccgctgctgcccgaatgtaacactttgacaatgcacaacgtgagttacgtgcgaggtcttccctgcagtgtgggatttacgctgattcaggaatgggttgttccctgggatatggttctaacgcgggaggagcttgtaatcctgaggaagtgtatgcacgtgtgcctgtgttgtgccaacattgatatcatgacgagcatgatgatccatggttacgagtcctgggctctccactgtcattgttccagtcccggttccctgcagtgtatagccggcgggcaggttttggccagctggtttaggatggtggtggatggcgccatgtttaatcagaggtttatatggtaccgggaggtggtgaattacaacatgccaaaagaggtaatgtttatgtccagcgtgtttatgaggggtcgccacttaatctacctgcgcttgtggtatgatggccacgtgggttctgtggtccccgccatgagctttggatacagcgccttgcactgtgggattttgaacaatattgtggtgctgtgctgcagttactgtgctgatttaagtgagatcagggtgcgctgctgtgcccggaggacaaggcgccttatgctgcgggcggtgcgaatcatcgctgaggagaccactgccatgttgtattcctgcaggacggagcggcggcggcagcagtttattcgcgcgctgctgcagcaccaccgccctatcctgatgcacgattatgactctacccccatgtaggcgtggacttctccttcgccgcccgttaagcaaccgcaagttggacagcagcctgtggctcagcagctggacagcgacatgaacttaagtgagctgcccggggagtttattaatatcactgatgagcgtttggctcgacaggaaaccgtgtggaatataacacctaagaatatgtctgttacccatgatatgatgctttttaaggccagccggggagaaaggactgtgtactctgtgtgttgggagggaggtggcaggttgaatactagggttctgtgagtttgattaaggtacggtgatctgtataagctatgtggtggtggggctatactactgaatgaaaaatgacttgaaattttctgcaattgaaaaataaacacgttgaaacataacacaaacgattctttattcttgggcaatgtatgaaaaagtgtaagaggatgtggcaaatatttcattaatgtagttgtggccagaccagtcccatgaaaatgacatagagtatgcacttggagttgtgtctcctgtttcctgtgtaccgtttagtgtaatggttagtgttacaggtttagttttgtctccgtttaagtaaacttgactgacaatgttacttttggcagttttaccgtgagattttggataagctgataggttaggcataaatccaacagcgtttgtataggctgtcgcccctcctgacgcggtaggaggaggggagggtgccctgcatgtctgccgctgctcttgctcttgccgctgctgaggaggggggcgcatctgccgcagcaccggatgcatctgggaaaagcaaaaaaggggctcgtccctgtttccggaggaatttgcaagcggggtcttgcatgacggggaggcaaacccccgttcgccgcagtccggccggtccgagactcgaaccgggggtcccgcgactcaacccttggaaaataaccctccggctacagggagcgagccacttaatgctttcgctttccagcctaaccgcttacgctgcgcgcggccagtggccaaaaaagctagcgcagcagccgccgcgcctggaaggaagccaaaaggagcactcccccgttgtctgacgtcgcacacctgggttcgacacgcgggcggtaaccgcatggatcacggcggacggccggatacggggctcgaaccccggtcgtccgccatgatacccttgcgaatttatccaccagaccacggaagagtgcccgcttacaggctctccttttgcacggtctagagcgtcaacgattgcgcgcgcctgaccggccagagcgtcccgaccatggagcactttttgccgctgcgcaacatctggaaccgcgtccgcgactttccgcgcgcctccaccaccgccgccggcatcacctggatgtccaggtacatctacggatatggcaaacagctattatgggtattatgggtgcggccgcggatcccgggcccgtcgactgcagaggcctgcatgcaagcttggtgtaatcatggtcatagctgtttcctgtgtgaaattgttatccgctcacaattccacacaacatacgagccggaagcataaagtgtaaagcctggggtgcctaatgagtgagctaactcacattaattgcgttgcgctcactgcccgctttccagtcgggaaacctgtcgtgccagctgcattaatgaatcggccaacgcgcggggagaggcggtttgcgtattgggcgctcttccgcttcctcgctcactgactcgctgcgctcggtcgttcggctgcggcgagcggtatcagctcactcaaaggcggtaatacggttatccacagaatcaggggataacgcaggaaagaacatgtgagcaaaaggccagcaaaaggccaggaaccgtaaaaaggccgcgttgctggcgtttttccataggctccgcccccctgacgagcatcacaaaaatcgacgctcaagtcagaggtggcgaaacccgacaggactataaagataccaggcgtttccccctggaagctccctcgtgcgctctcctgttccgaccctgccgcttaccggatacctgtccgcctttctcccttcgggaagcgtggcgctttctcatagctcacgctgtaggtatctcagttcggtgtaggtcgttcgctccaagctgggctgtgtgcacgaaccccccgttcagcccgaccgctgcgccttatccggtaactatcgtcttgagtccaacccggtaagacacgacttatcgccactggcagcagccactggtaacaggattagcagagcgaggtatgtaggcggtgctacagagttcttgaagtggtggcctaactacggctacactagaagaacagtatttggtatctgcgctctgctgaagccagttaccttcggaaaaagagttggtagctcttgatccggcaaacaaaccaccgctggtagcggtggtttttttgtttgcaagcagcagattacgcgcagaaaaaaaggatctcaagaagatcctttgatcttttctacggggtctgacgctcagtggaacgaaaactcacgttaagggattttggtcatgagattatcaaaaaggatcttcacctagaaggtcctgtattagaggtcacgtgagtgttttgcgacattttgcgacaccatgtggtcacgctgggtatttaagcccgagtgagcacgcagggtctccattttgaagcgggaggtttgaacgcgcagccgccatccttttaaattaaaaatgaagttttaaatcaagcccaatctgaataatgttacaaccaattaaccaattctgattagaaaaactcatcgagcatcaaatgaaactgcaatttattcatatcaggattatcaataccatatttttgaaaaagccgtttctgtaatgaaggagaaaactcaccgaggcagttccataggatggcaagatcctggtatcggtctgcgattccgactcgtccaacatcaatacaacctattaatttcccctcgtcaaaaataaggttatcaagtgagaaatcaccatgagtgacgactgaatccggtgagaatggcaaaagtttatgcatttctttccagacttgttcaacaggccagccattacgctcgtcatcaaaatcactcgcatcaaccaaaccgttattcattcgtgattgcgcctgagcgagacgaaatacgcgatcgctgttaaaaggacaattacaaacaggaatcgaatgcaaccggcgcaggaacactgccagcgcatcaacaatattttcacctgaatcaggatattcttctaatacctggaatgctgtttttccggggatcgcagtggtgagtaaccatgcatcatcaggagtacggataaaatgcttgatggtcggaagaggcataaattccgtcagccagtttagtctgaccatctcatctgtaacatcattggcaacgctacctttgccatgtttcagaaacaactctggcgcatcgggcttcccatacaagcgatagattgtcgcacctgattgcccgacattatcgcgagcccatttatacccatataaatcagcatccatgttggaatttaatcgcggcctcgacgtttcccgttgaatatggctcataacaccccttgtattactgtttatgtaagcagacagttttattgttcatgatgatatatttttatcttgtgcaatgtaacatcagagattttgagacacgggccagagctgca

SEQ ID NO: 245 - DNA, 5505 bp, synthetic construct; identical to SEQ ID NO: 106
  source 1..5505: mol_type = other DNA

SEQ ID NO: 246 - DNA, 2208 bp, synthetic construct
  source 1..2208: mol_type = other DNA
atggctgccgatggttatcttccagattggctcgaggacaaccttagtgaaggaattcgcgagtggtgggctttgaaacctggagcccctcaacccaaggcaaatcaacaacatcaagacaacgctcgaggtcttgtgcttccgggttacaaataccttggacccggcaacggactcgacaagggggagccggtcaacgcagcagacgcggcggccctcgagcacgacaaggcctacgaccagcagctcaaggccggagacaacccgtacctcaagtacaaccacgccgacgccgagttccaggagcggctcaaagaagatacgtcttttgggggcaacctcgggcgagcagtcttccaggccaaaaagaggcttcttgaacctcttggtctggtagaggaagcggctaagacggctcctggaaagaagaggcctgtagagcagtctcctcaggaaccggactcctccgcgggtattggcaaatcgggtgcacagcccgctaaaaagagactcaatttcggtcagactggcgacacagagtcagtcccagaccctcaaccaatcggagaacctcccgcagccccctcaggtgtgggatctcttacaatggcttcaggtggtggcgcaccagtggcagacaataacgaaggtgccgatggagtgggtagttcctcgggaaattggcattgcgattcccaatggctgggggacagagtcatcaccaccagcacccgaacctgggccctgcccacctacaacaatcacctctacaagcaaatctccaacagcacatctggaggatcttcaaatgacaacgcctacttcggctacagcaccccctgggggtattttgacttcaacagattccactgccacttctcaccacgtgactggcagcgactcatcaacaacaactggggattccggcctaagcgactcaacttcaagctcttcaacattcaggtcaaagaggttacggacaacaatggagtcaagaccatcgccaataaccttaccagcacggtccaggtcttcacggactcagactatcagctcccgtacgtgctcgggtcggctcacgagggctgcctcccgccgttcccagcggacgttttcatgattcctcagtacgggtatctgacgcttaatgatggaagccaggccgtgggtcgttcgtccttttactgcctggaatatttcccgtcgcaaatgctaagaacgggtaacaacttccagttcagctacgagtttgagaacgtacctttccatagcagctacgctcacagccaaagcctggaccgactaatgaatccactcatcgaccaatacttgtactatctctcaaagactattaacggttctggacagaatcaacaaacgctaaaattcagtgtggccggacccagcaacatggctgtccagggaagaaactacatacctggacccagctaccgacaacaacgtgtctcaaccactgtgactcaaaacaacaacagcgaatttgcttggcctggagcttcttcttgggctctcaatggacgtaatagcttgatgaatcctggacctgctatggccagccacaaagaaggagaggaccgtttctttcctttgtctggatctttaatttttggcaaacaaggaactggaagagacaacgtggatgcggacaaagtcatgataaccaacgaagaagaaattaaaactactaacccggtagcaacggagtcctatggacaagtggccacaaaccaccagagtgcccaagcacaggcgcagaccggctgggttcaaaaccaaggaatacttccgggtatggtttggcaggacagagatgtgtacctgcaaggacccatttgggccaaaattcctcacacggacggcaactttcacccttctccgctgatgggagggtttggaatgaagcacccgcctcctcagatcctcatcaaaaacacacctgtacctgcggatcctccaacggccttcaacaaggacaagctgaactctttcatcacccagtattctactggccaagtcagcgtggagatcgagtgggagctgcagaaggaaaacagcaagcgctggaacccggagatccagtacacttccaactattacaagtctaataatgttgaatttgctgttaatactgaaggtgtatatagtgaaccccgccccattggcaccagatacctgactcgtaatctg

SEQ ID NO: 247 - DNA, 4090 bp, synthetic construct
  source 1..4090: mol_type = other DNA
atgccggggttttacgagattgtgattaaggtccccagcgaccttgacgagcatctgcccggcatttctgacagctttgtgaactgggtggccgagaaggaatgggagttgccgccagattctgacatggatctgaatctgattgagcaggcacccctgaccgtggccgagaagctgcagcgcgactttctgacggaatggcgccgtgtgagtaaggccccggaggctcttttctttgtgcaatttgagaagggagagagctacttccacatgcacgtgctcgtggaaaccaccggggtgaaatccatggttttgggacgtttcctgagtcagattcgcgaaaaactgattcagagaatttaccgcgggatcgagccgactttgccaaactggttcgcggtcacaaagaccagaaatggcgccggaggcgggaacaaggtggtggatgagtgctacatccccaattacttgctccccaaaacccagcctgagctccagtgggcgtggactaatatggaacagtatttaagcgcctgtttgaatctcacggagcgtaaacggttggtggcgcagcatctgacgcacgtgtcgcagacgcaggagcagaacaaagagaatcagaatcccaattctgatgcgccggtgatcagatcaaaaacttcagccaggtacatggagctggtcgggtggctcgtggacaaggggattacctcggagaagcagtggatccaggaggaccaggcctcatacatctccttcaatgcggcctccaactcgcggtcccaaatcaaggctgccttggacaatgcgggaaagattatgagcctgactaaaaccgcccccgactacctggtgggccagcagcccgtggaggacatttccagcaatcggatttataaaattttggaactaaacgggtacgatccccaatatgcggcttccgtctttctgggatgggccacgaaaaagttcggcaagaggaacaccatctggctgtttgggcctgcaactaccgggaagaccaacatcgcggaggccatagcccacactgtgcccttctacgggtgcgtaaactggaccaatgagaactttcccttcaacgactgtgtcgacaagatggtgatctggtgggaggaggggaagatgaccgccaaggtcgtggagtcggccaaagccattctcggaggaagcaaggtgcgcgtggaccagaaatgcaagtcctcggcccagatagacccgactcccgtgatcgtcacctccaacaccaacatgtgcgccgtgattgacgggaactcaacgaccttcgaacaccagcagccgttgcaagaccggatgttcaaatttgaactcacccgccgtctggatcatgactttgggaaggtcaccaagcaggaagtcaaagactttttccggtgggcaaaggatcacgtggttgaggtggagcatgaattctacgtcaaaaagggtggagccaagaaaagacccgcccccagtgacgcagatataagtgagcccaaacgggtgcgcgagtcagttgcgcagccatcgacgtcagacgcggaagcttcgatcaactacgcagacaggtaccaaaacaaatgttctcgtcacgtgggcatgaatctgatgctgtttccctgcagacaatgcgagagaatgaatcagaattcaaatatctgcttcactcacggacagaaagactgtttagagtgctttcccgtgtcagaatctcaacccgtttctgtcgtcaaaaaggcgtatcagaaactgtgctacattcatcatatcatgggaaaggtgccagacgcttgcactgcctgcgatctggtcaatgtggatttggatgactgcatctttgaacaataaatgatttaaatcaggtatggctgccgatggttatcttccagattggctcgaggacaaccttagtgaaggaattcgcgagtggtgggctttgaaacctggagcccctcaacccaaggcaaatcaacaacatcaagacaacgctcgaggtcttgtgcttccgggttacaaataccttggacccggcaacggactcgacaagggggagccggtcaacgcagcagacgcggcggccctcgagcacgacaaggcctacgaccagcagctcaaggccggagacaacccgtacctcaagtacaaccacgccgacgccgagttccaggagcggctcaaagaagatacgtcttttgggggcaacctcgggcgagcagtcttccaggccaaaaagaggcttcttgaacctcttggtctggtagaggaagcggctaagacggctcctggaaagaagaggcctgtagagcagtctcctcaggaaccggactcctccgcgggtattggcaaatcgggtgcacagcccgctaaaaagagactcaatttcggtcagactggcgacacagagtcagtcccagaccctcaaccaatcggagaacctcccgcagccccctcaggtgtgggatctcttacaatggcttcaggtggtggcgcaccagtggcagacaataacgaaggtgccgatggagtgggtagttcctcgggaaattggcattgcgattcccaatggctgggggacagagtcatcaccaccagcacccgaacctgggccctgcccacctacaacaatcacctctacaagcaaatctccaacagcacatctggaggatcttcaaatgacaacgcctacttcggctacagcaccccctgggggtattttgacttcaacagattccactgccacttctcaccacgtgactggcagcgactcatcaacaacaactggggattccggcctaagcgactcaacttcaagctcttcaacattcaggtcaaagaggttacggacaacaatggagtcaagaccatcgccaataaccttaccagcacggtccaggtcttcacggactcagactatcagctcccgtacgtgctcgggtcggctcacgagggctgcctcccgccgttcccagcggacgttttcatgattcctcagtacgggtatctgacgcttaatgatggaagccaggccgtgggtcgttcgtccttttactgcctggaatatttcccgtcgcaaatgctaagaacgggtaacaacttccagttcagctacgagtttgagaacgtacctttccatagcagctacgctcacagccaaagcctggaccgactaatgaatccactcatcgaccaatacttgtactatctctcaaagactattaacggttctggacagaatcaacaaacgctaaaattcagtgtggccggacccagcaacatggctgtccagggaagaaactacatacctggacccagctaccgacaacaacgtgtctcaaccactgtgactcaaaacaacaacagcgaatttgcttggcctggagcttcttcttgggctctcaatggacgtaatagcttgatgaatcctggacctgctatggccagccacaaagaaggagaggaccgtttctttcctttgtctggatctttaatttttggcaaacaaggaactggaagagacaacgtggatgcggacaaagtcatgataaccaacgaagaagaaattaaaactactaacccggtagcaacggagtcctatggacaagtggccacaaaccaccagagtgcccaagcacaggcgcagaccggctgggttcaaaaccaaggaatacttccgggtatggtttggcaggacagagatgtgtacctgcaaggacccatttgggccaaaattcctcacacggacggcaactttcacccttctccgctgatgggagggtttggaatgaagcacccgcctcctcagatcctcatcaaaaacacacctgtacctgcggatcctccaacggccttcaacaaggacaagctgaactctttcatcacccagtattctactggccaagtcagcgtggagatcgagtgggagctgcagaaggaaaacagcaagcgctggaacccggagatccagtacacttccaactattacaagtctaataatgttgaatttgctgttaatactgaaggtgtatatagtgaaccccgccccattggcaccagatacctgactcgtaatctg

SEQ ID NO: 248 - DNA, 9819 bp, synthetic construct
  source 1..9819: mol_type = other DNA
atgccggggttttacgagattgtgattaaggtccccagcgaccttgacgagcatctgcccggcatttctgacagctttgtgaactgggtggccgagaaggaatgggagttgccgccagattctgacatggatctgaatctgattgagcaggcacccctgaccgtggccgagaagctgcagcgcgactttctgacggaatggcgccgtgtgagtaaggccccggaggctcttttctttgtgcaatttgagaagggagagagctacttccacatgcacgtgctcgtggaaaccaccggggtgaaatccatggttttgggacgtttcctgagtcagattcgcgaaaaactgattcagagaatttaccgcgggatcgagccgactttgccaaactggttcgcggtcacaaagaccagaaatggcgccggaggcgggaacaaggtggtggatgagtgctacatccccaattacttgctccccaaaacccagcctgagctccagtgggcgtggactaatatggaacagtatttaagcgcctgtttgaatctcacggagcgtaaacggttggtggcgcagcatctgacgcacgtgtcgcagacgcaggagcagaacaaagagaatcagaatcccaattctgatgcgccggtgatcagatcaaaaacttcagccaggtacatggagctggtcgggtggctcgtggacaaggggattacctcggagaagcagtggatccaggaggaccaggcctcatacatctccttcaatgcggcctccaactcgcggtcccaaatcaaggctgccttggacaatgcgggaaagattatgagcctgactaaaaccgcccccgactacctggtgggccagcagcccgtggaggacatttccagcaatcggatttataaaattttggaactaaacgggtacgatccccaatatgcggcttccgtctttctgggatgggccacgaaaaagttcggcaagaggaacaccatctggctgtttgggcctgcaactaccgggaagaccaacatcgcggaggccatagcccacactgtgcccttctacgggtgcgtaaactggaccaatgagaactttcccttcaacgactgtgtcgacaagatggtgatctggtgggaggaggggaagatgaccgccaaggtcgtggagtcggccaaagccattctcggaggaagcaaggtgcgcgtggaccagaaatgcaagtcctcggcccagatagacccgactcccgtgatcgtcacctccaacaccaacatgtgcgccgtgattgacgggaactcaacgaccttcgaacaccagcagccgttgcaagaccggatgttcaaatttgaactcacccgccgtctggatcatgactttgggaaggtcaccaagcaggaagtcaaagactttttccggtgggcaaaggatcacgtggttgaggtggagcatgaattctacgtcaaaaagggtggagccaagaaaagacccgcccccagtgacgcagatataagtgagcccaaacgggtgcgcgagtcagttgcgcagccatcgacgtcagacgcggaagcttcgatcaactacgcagacaggtaccaaaacaaatgttctcgtcacgtgggcatgaatctgatgctgtttccctgcagacaatgcgagagaatgaatcagaattcaaatatctgcttcactcacggacagaaagactgtttagagtgctttcccgtgtcagaatctcaacccgtttctgtcgtcaaaaaggcgtatcagaaactgtgctacattcatcatatcatgggaaaggtgccagacgcttgcactgcctgcgatctggtcaatgtggatttggatgactgcatctttgaacaataaatgatttaaatcaggtatggctgccgatggttatcttccagattggctcgaggacaaccttagtgaaggaattcgcgagtggtgggctttgaaacctggagcccctcaacccaaggcaaatcaacaacatcaagacaacgctcgaggtcttgtgcttccgggttacaaataccttggacccggcaacggactcgacaagggggagccggtcaacgcagcagacgcggcggccctcgagcacgacaaggcctacgaccagcagctcaaggccggagacaacccgtacctcaagtacaaccacgccgacgccgagttccaggagcggctcaaagaagatacgtcttttgggggcaacctcgggcgagcagtcttccaggccaaaaagaggcttcttgaacctcttggtctggtagaggaagcggctaagacggctcctggaaagaagaggcctgtagagcagtctcctcaggaaccggactcctccgcgggtattggcaaatcgggtgcacagcccgctaaaaagagactcaatttcggtcagactggcgacacagagtcagtcccagaccctcaaccaatcggagaacctcccgcagccccctcaggtgtgggatctcttacaatggcttcaggtggtggcgcaccagtggcagacaataacgaaggtgccgatggagtgggtagttcctcgggaaattggcattgcgattcccaatggctgggggacagagtcatcaccaccagcacccgaacctgggccctgcccacctacaacaatcacctctacaagcaaatctccaacagcacatctggaggatcttcaaatgacaacgcctacttcggctacagcaccccctgggggtattttgacttcaacagattccactgccacttctcaccacgtgactggcagcgactcatcaacaacaactggggattccggcctaagcgactcaacttcaagctcttcaacattcaggtcaaagaggttacggacaacaatggagtcaagaccatcgccaataaccttaccagcacggtccaggtcttcacggactcagactatcagctcccgtacgtgctcgggtcggctcacgagggctgcctcccgccgttcccagcggacgttttcatgattcctcagtacgggtatctgacgcttaatgatggaagccaggccgtgggtcgttcgtccttttactgcctggaatatttcccgtcgcaaatgctaagaacgggtaacaacttccagttcagctacgagtttgagaacgtacctttccatagcagctacgctcacagccaaagcctggaccgactaatgaatccactcatcgaccaatacttgtactatctctcaaagactattaacggttctggacagaatcaacaaacgctaaaattcagtgtggccggacccagcaacatggctgtccagggaagaaactacatacctggacccagctaccgacaacaacgtgtctcaaccactgtgactcaaaacaacaacagcgaatttgcttggcctggagcttcttcttgggctctcaatggacgtaatagcttgatgaatcctggacctgctatggccagccacaaagaaggagaggaccgtttctttcctttgtctggatctttaatttttggcaaacaaggaactggaagagacaacgtggatgcggacaaagtcatgataaccaacgaagaagaaattaaaactactaacccggtagcaacggagtcctatggacaagtggccacaaaccaccagagtgcccaagcacaggcgcagaccggctgggttcaaaaccaaggaatacttccgggtatggtttggcaggacagagatgtgtacctgcaaggacccatttgggccaaaattcctcacacggacggcaactttcacccttctccgctgatgggagggtttggaatgaagcacccgcctcctcagatcctcatcaaaaacacacctgtacctgcggatcctccaacggccttcaacaaggacaagctgaactctttcatcacccagtattctactggccaagtcagcgtggagatcgagtgggagctgcagaaggaaaacagcaagcgctggaacccggagatccagtacacttccaactattacaagtctaataatgttgaatttgctgttaatactgaaggtgtatatagtgaaccccgccccattggcaccagatacctgactcgtaatctgtaattgcctgttaatcaataaaccggttgattcgtttcagttgaactttggtctctgcgaagggcgaattcgtttaaacctgcaggactagagccgaattctgcatcgcgatagggataacagggtaataaataatgtactagagacactttcaataaaggcaaatgcttttatttgtacactctcgggtgattatttacccccacccttgccgtctgcgccgttcagaagtcgaaggggttctgtctggcatcggaatgggccacgggcagagacacgttccggtactggtgcttggtggaccacttgaactcaggcacgaccattctaggcagctctgtgaagttctcgctccacaggctccgcaccatcaccagggcgttcagcaggtcaggggcgctgattttgaagtcgcagttaggtccgccgccctgggctctgctgtttctgtacacagggttgcagcactggaacacaataagagcagggtggtgcacgctggccagcacagacttgtcgctgatcaggtcggcgtcgagatcctcggcgttagacaaggcaaaaggggtcagcttgggcagctggcggcccaggaaaggggcgtggccgggcttgctattgcactcgcatctcagaggcatcagcaggtggccgtggccggtctgggcgttggggtacagggcctgcataaaggccttgatctgtttgaaggccacttgggccttggcgccttcggagaagaacatgccgcagcttttgccgctgaactggttggcggggcaggcggcgtcgtgcacacaacaccgggcgtcggtattgctgatctgcaccacgtttctgccccatctgttcttcacgatcttggccttgctgctctgctctttcagggccctctggccgttctcagaggtgacgtccatctcgatcacatgttccttgttgatcatgatgctgccgtgcagacacttcagctcgccctcgatttccgcgcatctgtgcagccacagggcacaaccggtaggctcgtggtgcttgtatgtcacctcagcaaaagattgcaggtaggcttgcaggaatctgcccatcatggtcacgaaggtcttgttggaggtaaaagtcagctgcagtcctctgtgttcctcgttcagccatgtcttgcacacggcggccagagcctcgacctgatctggcagcagcttgaaattagccttcaggtcgttgtccacgtgatacttatccatcagtgctctggcggcttccatgcccttctcccaggcggaaacgatgggcacgctcagggggttcatcacggtgatctcgctttcagcttctgaaggttcctcctcttcctcctgtgttctcatgccccgagccacggggtcgtcctcattcagtctccgcacggttctttttcctccctttccgtgcttaatcagtacaggaggattagagaagcccaccatctggagggcgacgtcctccctttcttcttcgctatccacgatcacttctgggctggggggccgttcaggctttgggctaggccgtttttttttcttcttaggggcgatagccagatcagcggcgcttgtagagggccgaggactaggggttctaggcacgagggcgtcctggctgctgtcctcctcatcctcgctctcgatccgtctccgcattctcttcttagggggggcccgcggagggggagggctagggctaggggacgacacatcttccatggttggaggtctgcgagcagcgcctctgcctctctctggtgttgtctcgcgctgttcttcctctctagaggccatttccttctcctataggcagaaaaagatcgttgaaactcactccggggctgtggacgtcggcttaccttcgcaaatttgtacctgaggactaccacgcccacgagattaggttctacgaagaccaatcccgcccgcctaatgcggagcttaccgcctgcgtcattacccagggccacattcttggccaattgcaagccatcaacaaagcccgccaagagtttctgctacgaaagggacggggggtttacttggacccccagtccggcgaggagctcaacccaatccccccgccgccgcagccctatcagcagcagccgcgggcccttgcttcccaggatggcacccaaaaagaagctgcagctgccgccgccacccacggacgaggaggaatactgggacagtcaggcagaggaggttttggacgaggaggaggaggacatgatggaagactgggagagcctagacgaggaagcttccgaggtcgaagaggtgtcagacgaaacaccgtcaccctcggtcgcattcccctcgccggcgccccagaaatcggcaaccggttccagcatggctacaacctccgctcctcaggcgccgccggcactgcccgttcgccgacccaaccgtagatgggacaccactggaaccagggccggtaagtccaagcagccgccgccgttagcccaagagcaacaacagcgccaaggctaccgctcatggcgcgggcacaagaacgccatagttgcttgcttgcaagactgtgggggcaacatctccttcgcccgccgctttcttctctaccatcacggcgtggccttcccccgtaacatcctgcattactaccgtcatctctacagcccatactgcaccggcggcagcggcagcaacagcagcggccacacagaagcaaaggcgaccggatagcaagactctgacaaagcccaagaaatccacagcggcggcagcagcaggaggaggagcgctgcgtctggcgcccaacgaacccgtatcgacccgcgagcttagaaacaggatttttcccactctgtatgctatatttcaacagagcaggggccaagaacaagagctgaaaataaaaaacaggtctctgcgatccctcacccgcagctgcctgtatcacaaaagcgaagatcagcttcggcgcacgctggaagacgcggaggctctcttcagtaaatactgcgcgctgactcttaaggactagtttcgcgccctttctcaaatttaagcgcgaaaactacgtcatctccagcggccacacccggcgccagcacctgttgtcagcgccattttttagggcggagtaacttgtatgtgttgggaattgtagttttcttaaaatgggaagtgacgtaacgtgggaaaacggaagtgacgatttgaggaagttgtgggttttttggctttcgtttctgggcgtaggttcgcgtgcggttttctgggtgttttttgtggactttaaccgttacgtcattttttagtcctatatatactcgctctgcacttggcccttttttacactgtgactgattgagctggtgccgtgtcgagtggtgtttttttaataggttttcttttttactggtaaggctgactgttatgactacgtccggcgttccatttggcatgacactacgaccaacacgatctcggttgtctcggcgcactccgtacagtagggatcgtctacctccttttgagacagaaacccgcgctaccatactggaggatcatccgctgctgcccgaatgtaacactttgacaatgcacaacgtgagttacgtgcgaggtcttccctgcagtgtgggatttacgctgattcaggaatgggttgttccctgggatatggttctaacgcgggaggagcttgtaatcctgaggaagtgtatgcacgtgtgcctgtgttgtgccaacattgatatcatgacgagcatgatgatccatggttacgagtcctgggctctccactgtcattgttccagtcccggttccctgcagtgtatagccggcgggcaggttttggccagctggtttaggatggtggtggatggcgccatgtttaatcagaggtttatatggtaccgggaggtggtgaattacaacatgccaaaagaggtaatgtttatgtccagcgtgtttatgaggggtcgccacttaatctacctgcgcttgtggtatgatggccacgtgggttctgtggtccccgccatgagctttggatacagcgccttgcactgtgggattttgaacaatattgtggtgctgtgctgcagttactgtgctgatttaagtgagatcagggtgcgctgctgtgcccggaggacaaggcgccttatgctgcgggcggtgcgaatcatcgctgaggagaccactgccatgttgtattcctgcaggacggagcggcggcggcagcagtttattcgcgcgctgctgcagcaccaccgccctatcctgatgcacgattatgactctacccccatgtaggcgtggacttctccttcgccgcccgttaagcaaccgcaagttggacagcagcctgtggctcagcagctggacagcgacatgaacttaagtgagctgcccggggagtttattaatatcactgatgagcgtttggctcgacaggaaaccgtgtggaatataacacctaagaatatgtctgttacccatgatatgatgctttttaaggccagccggggagaaaggactgtgtactctgtgtgttgggagggaggtggcaggttgaatactagggttctgtgagtttgattaaggtacggtgatctgtataagctatgtggtggtggggctatactactgaatgaaaaatgacttgaaattttctgcaattgaaaaataaacacgttgaaacataacacaaacgattctttattcttgggcaatgtatgaaaaagtgtaagaggatgtggcaaatatttcattaatgtagttgtggccagaccagtcccatgaaaatgacatagagtatgcacttggagttgtgtctcctgtttcctgtgtaccgtttagtgtaatggttagtgttacaggtttagttttgtctccgtttaagtaaacttgactgacaatgttacttttggcagttttaccgtgagattttggataagctgataggttaggcataaatccaacagcgtttgtataggctgtcgcccctcctgacgcggtaggaggaggggagggtgccctgcatgtctgccgctgctcttgctcttgccgctgctgaggaggggggcgcatctgccgcagcaccggatgcatctgggaaaagcaaaaaaggggctcgtccctgtttccggaggaatttgcaagcggggtcttgcatgacggggaggcaaacccccgttcgccgcagtccggccggtccgagactcgaaccgggggtcccgcgactcaacccttggaaaataaccctccggctacagggagcgagccacttaatgctttcgctttccagcctaaccgcttacgctgcgcgcggccagtggccaaaaaagctagcgcagcagccgccgcgcctggaaggaagccaaaaggagcactcccccgttgtctgacgtcgcacacctgggttcgacacgcgggcggtaaccgcatggatcacggcggacggccggatacggggctcgaaccccggtcgtccgccatgatacccttgcgaatttatccaccagaccacggaagagtgcccgcttacaggctctccttttgcacggtctagagcgtcaacgattgcgcgcgcctgaccggccagagcgtcccgaccatggagcactttttgccgctgcgcaacatctggaaccgcgtccgcgactttccgcgcgcctccaccaccgccgccggcatcacctggatgtccaggtacatctacggata

SEQ ID NO: 249 - DNA, 12582 bp, synthetic construct
  source 1..12582: mol_type = other DNA
tcgcgcgtttcggtgatgacggtgaaaacctctgacacatgcagctcccggagacggtcacagcttgtctgtaagcggatgccgggagcagacaagcccgtcagggcgcgtcagcgggtgttggcgggtgtcggggctggcttaactatgcggcatcagagcagattgtactgagagtgcaccatatgcggtgtgaaataccgcacagatgcgtaaggagaaaataccgcatcaggcgccattcgccattcaggctgcgcaactgttgggaagggcgatcggtgcgggcctcttcgctattacgccagctggcgaaagggggatgtgctgcaaggcgattaagttgggtaacgccagggttttcccagtcacgacgttgtaaaacgacggccagagaattccgcagggtctccattttgaagcgggaggtttgaacgcgcagccgccatgccggggttttacgagattgtgattaaggtccccagcgaccttgacgagcatctgcccggcatttctgacagctttgtgaactgggtggccgagaaggaatgggagttgccgccagattctgacatggatctgaatctgattgagcaggcacccctgaccgtggccgagaagctgcagcgcgactttctgacggaatggcgccgtgtgagtaaggccccggaggctcttttctttgtgcaatttgagaagggagagagctacttccacatgcacgtgctcgtggaaaccaccggggtgaaatccatggttttgggacgtttcctgagtcagattcgcgaaaaactgattcagagaatttaccgcgggatcgagccgactttgccaaactggttcgcggtcacaaagaccagaaatggcgccggaggcgggaacaaggtggtggatgagtgctacatccccaattacttgctccccaaaacccagcctgagctccagtgggcgtggactaatatggaacagtatttaagcgcctgtttgaatctcacggagcgtaaacggttggtggcgcagcatctgacgcacgtgtcgcagacgcaggagcagaacaaagagaatcagaatcccaattctgatgcgccggtgatcagatcaaaaacttcagccaggtacatggagctggtcgggtggctcgtggacaaggggattacctcggagaagcagtggatccaggaggaccaggcctcatacatctccttcaatgcggcctccaactcgcggtcccaaatcaaggctgccttggacaatgcgggaaagattatgagcctgactaaaaccgcccccgactacctggtgggccagcagcccgtggaggacatttccagcaatcggatttataaaattttggaactaaacgggtacgatccccaatatgcggcttccgtctttctgggatgggccacgaaaaagttcggcaagaggaacaccatctggctgtttgggcctgcaactaccgggaagaccaacatcgcggaggccatagcccacactgtgcccttctacgggtgcgtaaactggaccaatgagaactttcccttcaacgactgtgtcgacaagatggtgatctggtgggaggaggggaagatgaccgccaaggtcgtggagtcggccaaagccattctcggaggaagcaaggtgcgcgtggaccagaaatgcaagtcctcggcccagatagacccgactcccgtgatcgtcacctccaacaccaacatgtgcgccgtgattgacgggaactcaacgaccttcgaacaccagcagccgttgcaagaccggatgttcaaatttgaactcacccgccgtctggatcatgactttgggaaggtcaccaagcaggaagtcaaagactttttccggtgggcaaaggatcacgtggttgaggtggagcatgaattctacgtcaaaaagggtggagccaagaaaagacccgcccccagtgacgcagatataagtgagcccaaacgggtgcgcgagtcagttgcgcagccatcgacgtcagacgcggaagcttcgatcaactacgcagacaggtaccaaaacaaatgttctcgtcacgtgggcatgaatctgatgctgtttccctgcagacaatgcgagagaatgaatcagaattcaaatatctgcttcactcacggacagaaagactgtttagagtgctttcccgtgtcagaatctcaacccgtttctgtcgtcaaaaaggcgtatcagaaactgtgctacattcatcatatcatgggaaaggtgccagacgcttgcactgcctgcgatctggtcaatgtggatttggatgactgcatctttgaacaataaatgatttaaatcaggtatggctgccgatggttatcttccagattggctcgaggacaaccttagtgaaggaattcgcgagtggtgggctttgaaacctggagcccctcaacccaaggcaaatcaacaacatcaagacaacgctcgaggtcttgtgcttccgggttacaaataccttggacccggcaacggactcgacaagggggagccggtcaacgcagcagacgcggcggccctcgagcacgacaaggcctacgaccagcagctcaaggccggagacaacccgtacctcaagtacaaccacgccgacgccgagttccaggagcggctcaaagaagatacgtcttttgggggcaacctcgggcgagcagtcttccaggccaaaaagaggcttcttgaacctcttggtctggtagaggaagcggctaagacggctcctggaaagaagaggcctgtagagcagtctcctcaggaaccggactcctccgcgggtattggcaaatcgggtgcacagcccgctaaaaagagactcaatttcggtcagactggcgacacagagtcagtcccagaccctcaaccaatcggagaacctcccgcagccccctcaggtgtgggatctcttacaatggcttcaggtggtggcgcaccagtggcagacaataacgaaggtgccgatggagtgggtagttcctcgggaaattggcattgcgattcccaatggctgggggacagagtcatcaccaccagcacccgaacctgggccctgcccacctacaacaatcacctctacaagcaaatctccaacagcacatctggaggatcttcaaatgacaacgcctacttcggctacagcaccccctgggggtattttgacttcaacagattccactgccacttctcaccacgtgactggcagcgactcatcaacaacaactggggattccggcctaagcgactcaacttcaagctcttcaacattcaggtcaaagaggttacggacaacaatggagtcaagaccatcgccaataaccttaccagcacggtccaggtcttcacggactcagactatcagctcccgtacgtgctcgggtcggctcacgagggctgcctcccgccgttcccagcggacgttttcatgattcctcagtacgggtatctgacgcttaatgatggaagccaggccgtgggtcgttcgtccttttactgcctggaatatttcccgtcgcaaatgctaagaacgggtaacaacttccagttcagctacgagtttgagaacgtacctttccatagcagctacgctcacagccaaagcctggaccgactaatgaatccactcatcgaccaatacttgtactatctctcaaagactattaacggttctggacagaatcaacaaacgctaaaattcagtgtggccggacccagcaacatggctgtccagggaagaaactacatacctggacccagctaccgacaacaacgtgtctcaaccactgtgactcaaaacaacaacagcgaatttgcttggcctggagcttcttcttgggctctcaatggacgtaatagcttgatgaatcctggacctgctatggccagccacaaagaaggagaggaccgtttctttcctttgtctggatctttaatttttggcaaacaaggaactggaagagacaacgtggatgcggacaaagtcatgataaccaacgaagaagaaattaaaactactaacccggtagcaacggagtcctatggacaagtggccacaaaccaccagagtgcccaagcacaggcgcagaccggctgggttcaaaaccaaggaatacttccgggtatggtttggcaggacagagatgtgtacctgcaaggacccatttgggccaaaattcctcacacggacggcaactttcacccttctccgctgatgggagggtttggaatgaagcacccgcctcctcagatcctcatcaaaaacacacctgtacctgcggatcctccaacggccttcaacaaggacaagctgaactctttcatcacccagtattctactggccaagtcagcgtggagatcgagtgggagctgcagaaggaaaacagcaagcgctggaacccggagatccagtacacttccaactattacaagtctaataatgttgaatttgctgttaatactgaaggtgtatatagtgaaccccgccccattggcaccagatacctgactcgtaatctgtaattgcctgttaatcaataaaccggttgattcgtttcagttgaactttggtctctgcgaagggcgaattcgtttaaacctgcaggactagagccgaattctgcatcgcgatagggataacagggtaataaataatgtactagagacactttcaataaaggcaaatgcttttatttgtacactctcgggtgattatttacccccacccttgccgtctgcgccgttcagaagtcgaaggggttctgtctggcatcggaatgggccacgggcagagacacgttccggtactggtgcttggtggaccacttgaactcaggcacgaccattctaggcagctctgtgaagttctcgctccacaggctccgcaccatcaccagggcgttcagcaggtcaggggcgctgattttgaagtcgcagttaggtccgccgccctgggctctgctgtttctgtacacagggttgcagcactggaacacaataagagcagggtggtgcacgctggccagcacagacttgtcgctgatcaggtcggcgtcgagatcctcggcgttagacaaggcaaaaggggtcagcttgggcagctggcggcccaggaaaggggcgtggccgggcttgctattgcactcgcatctcagaggcatcagcaggtggccgtggccggtctgggcgttggggtacagggcctgcataaaggccttgatctgtttgaaggccacttgggccttggcgccttcggagaagaacatgccgcagcttttgccgctgaactggttggcggggcaggcggcgtcgtgcacacaacaccgggcgtcggtattgctgatctgcaccacgtttctgccccatctgttcttcacgatcttggccttgctgctctgctctttcagggccctctggccgttctcagaggtgacgtccatctcgatcacatgttccttgttgatcatgatgctgccgtgcagacacttcagctcgccctcgatttccgcgcatctgtgcagccacagggcacaaccggtaggctcgtggtgcttgtatgtcacctcagcaaaagattgcaggtaggcttgcaggaatctgcccatcatggtcacgaaggtcttgttggaggtaaaagtcagctgcagtcctctgtgttcctcgttcagccatgtcttgcacacggcggccagagcctcgacctgatctggcagcagcttgaaattagccttcaggtcgttgtccacgtgatacttatccatcagtgctctggcggcttccatgcccttctcccaggcggaaacgatgggcacgctcagggggttcatcacggtgatctcgctttcagcttctgaaggttcctcctcttcctcctgtgttctcatgccccgagccacggggtcgtcctcattcagtctccgcacggttctttttcctccctttccgtgcttaatcagtacaggaggattagagaagcccaccatctggagggcgacgtcctccctttcttcttcgctatccacgatcacttctgggctggggggccgttcaggctttgggctaggccgtttttttttcttcttaggggcgatagccagatcagcggcgcttgtagagggccgaggactaggggttctaggcacgagggcgtcctggctgctgtcctcctcatcctcgctctcgatccgtctccgcattctcttcttagggggggcccgcggagggggagggctagggctaggggacgacacatcttccatggttggaggtctgcgagcagcgcctctgcctctctctggtgttgtctcgcgctgttcttcctctctagaggccatttccttctcctataggcagaaaaagatcgttgaaactcactccggggctgtggacgtcggcttaccttcgcaaatttgtacctgaggactaccacgcccacgagattaggttctacgaagaccaatcccgcccgcctaatgcggagcttaccgcctgcgtcattacccagggccacattcttggccaattgcaagccatcaacaaagcccgccaagagtttctgctacgaaagggacggggggtttacttggacccccagtccggcgaggagctcaacccaatccccccgccgccgcagccctatcagcagcagccgcgggcccttgcttcccaggatggcacccaaaaagaagctgcagctgccgccgccacccacggacgaggaggaatactgggacagtcaggcagaggaggttttggacgaggaggaggaggacatgatggaagactgggagagcctagacgaggaagcttccgaggtcgaagaggtgtcagacgaaacaccgtcaccctcggtcgcattcccctcgccggcgccccagaaatcggcaaccggttccagcatggctacaacctccgctcctcaggcgccgccggcactgcccgttcgccgacccaaccgtagatgggacaccactggaaccagggccggtaagtccaagcagccgccgccgttagcccaagagcaacaacagcgccaaggctaccgctcatggcgcgggcacaagaacgccatagttgcttgcttgcaagactgtgggggcaacatctccttcgcccgccgctttcttctctaccatcacggcgtggccttcccccgtaacatcctgcattactaccgtcatctctacagcccatactgcaccggcggcagcggcagcaacagcagcggccacacagaagcaaaggcgaccggatagcaagactctgacaaagcccaagaaatccacagcggcggcagcagcaggaggaggagcgctgcgtctggcgcccaacgaacccgtatcgacccgcgagcttagaaacaggatttttcccactctgtatgctatatttcaacagagcaggggccaagaacaagagctgaaaataaaaaacaggtctctgcgatccctcacccgcagctgcctgtatcacaaaagcgaagatcagcttcggcgcacgctggaagacgcggaggctctcttcagtaaatactgcgcgctgactcttaaggactagtttcgcgccctttctcaaatttaagcgcgaaaactacgtcatctccagcggccacacccggcgccagcacctgttgtcagcgccattttttagggcggagtaacttgtatgtgttgggaattgtagttttcttaaaatgggaagtgacgtaacgtgggaaaacggaagtgacgatttgaggaagttgtgggttttttggctttcgtttctgggcgtaggttcgcgtgcggttttctgggtgttttttgtggactttaaccgttacgtcattttttagtcctatatatactcgctctgcacttggcccttttttacactgtgactgattgagctggtgccgtgtcgagtggtgtttttttaataggttttcttttttactggtaaggctgactgttatgactacgtccggcgttccatttggcatgacactacgaccaacacgatctcggttgtctcggcgcactccgtacagtagggatcgtctacctccttttgagacagaaacccgcgctaccatactggaggatcatccgctgctgcccgaatgtaacactttgacaatgcacaacgtgagttacgtgcgaggtcttccctgcagtgtgggatttacgctgattcaggaatgggttgttccctgggatatggttctaacgcgggaggagcttgtaatcctgaggaagtgtatgcacgtgtgcctgtgttgtgccaacattgatatcatgacgagcatgatgatccatggttacgagtcctgggctctccactgtcattgttccagtcccggttccctgcagtgtatagccggcgggcaggttttggccagctggtttaggatggtggtggatggcgccatgtttaatcagaggtttatatggtaccgggaggtggtgaattacaacatgccaaaagaggtaatgtttatgtccagcgtgtttatgaggggtcgccacttaatctacctgcgcttgtggtatgatggccacgtgggttctgtggtccccgccatgagctttggatacagcgccttgcactgtgggattttgaacaatattgtggtgctgtgctgcagttactgtgctgatttaagtgagatcagggtgcgctgctgtgcccggaggacaaggcgccttatgctgcgggcggtgcgaatcatcgctgaggagaccactgccatgttgtattcctgcaggacggagcggcggcggcagcagtttattcgcgcgctgctgcagcaccaccgccctatcctgatgcacgattatgactctacccccatgtaggcgtggacttctccttcgccgcccgttaagcaaccgcaagttggacagcagcctgtggctcagcagctggacagcgacatgaacttaagtgagctgcccggggagtttattaatatcactgatgagcgtttggctcgacaggaaaccgtgtggaatataacacctaagaatatgtctgttacccatgatatgatgctttttaaggccagccggggagaaaggactgtgtactctgtgtgttgggagggaggtggcaggttgaatactagggttctgtgagtttgattaaggtacggtgatctgtataagctatgtggtggtggggctatactactgaatgaaaaatgacttgaaattttctgcaattgaaaaataaacacgttgaaacataacacaaacgattctttattcttgggcaatgtatgaaaaagtgtaagaggatgtggcaaatatttcattaatgtagttgtggccagaccagtcccatgaaaatgacatagagtatgcacttggagttgtgtctcctgtttcctgtgtaccgtttagtgtaatggttagtgttacaggtttagttttgtctccgtttaagtaaacttgactgacaatgttacttttggcagttttaccgtgagattttggataagctgataggttaggcataaatccaacagcgtttgtataggctgtcgcccctcctgacgcggtaggaggaggggagggtgccctgcatgtctgccgctgctcttgctcttgccgctgctgaggaggggggcgcatctgccgcagcaccggatgcatctgggaaaagcaaaaaaggggctcgtccctgtttccggaggaatttgcaagcggggtcttgcatgacggggaggcaaacccccgttcgccgcagtccggccggtccgagactcgaaccgggggtcccgcgactcaacccttggaaaataaccctccggctacagggagcgagccacttaatgctttcgctttccagcctaaccgcttacgctgcgcgcggccagtggccaaaaaagctagcgcagcagccgccgcgcctggaaggaagccaaaaggagcactcccccgttgtctgacgtcgcacacctgggttcgacacgcgggcggtaaccgcatggatcacggcggacggccggatacggggctcgaaccccggtcgtccgccatgatacccttgcgaatttatccaccagaccacggaagagtgcccgcttacaggctctccttttgcacggtctagagcgtcaacgattgcgcgcgcctgaccggccagagcgtcccgaccatggagcactttttgccgctgcgcaacatctggaaccgcgtccgcgactttccgcgcgcctccaccaccgccgccggcatcacctggatgtccaggtacatctacggatatggcaaacagctattatgggtattatgggtgcggccgcggatcccgggcccgtcgactgcagaggcctgcatgcaagcttggtgtaatcatggtcatagctgtttcctgtgtgaaattgttatccgctcacaattccacacaacatacgagccggaagcataaagtgtaaagcctggggtgcctaatgagtgagctaactcacattaattgcgttgcgctcactgcccgctttccagtcgggaaacctgtcgtgccagctgcattaatgaatcggccaacgcgcggggagaggcggtttgcgtattgggcgctcttccgcttcctcgctcactgactcgctgcgctcggtcgttcggctgcggcgagcggtatcagctcactcaaaggcggtaatacggttatccacagaatcaggggataacgcaggaaagaacatgtgagcaaaaggccagcaaaaggccaggaaccgtaaaaaggccgcgttgctggcgtttttccataggctccgcccccctgacgagcatcacaaaaatcgacgctcaagtcagaggtggcgaaacccgacaggactataaagataccaggcgtttccccctggaagctccctcgtgcgctctcctgttccgaccctgccgcttaccggatacctgtccgcctttctcccttcgggaagcgtggcgctttctcatagctcacgctgtaggtatctcagttcggtgtaggtcgttcgctccaagctgggctgtgtgcacgaaccccccgttcagcccgaccgctgcgccttatccggtaactatcgtcttgagtccaacccggtaagacacgacttatcgccactggcagcagccactggtaacaggattagcagagcgaggtatgtaggcggtgctacagagttcttgaagtggtggcctaactacggctacactagaagaacagtatttggtatctgcgctctgctgaagccagttaccttcggaaaaagagttggtagctcttgatccggcaaacaaaccaccgctggtagcggtggtttttttgtttgcaagcagcagattacgcgcagaaaaaaaggatctcaagaagatcctttgatcttttctacggggtctgacgctcagtggaacgaaaactcacgttaagggattttggtcatgagattatcaaaaaggatcttcacctagaaggtcctgtattagaggtcacgtgagtgttttgcgacattttgcgacaccatgtggtcacgctgggtatttaagcccgagtgagcacgcagggtctccattttgaagcgggaggtttgaacgcgcagccgccatccttttaaattaaaaatgaagttttaaatcaagcccaatctgaataatgttacaaccaattaaccaattctgattagaaaaactcatcgagcatcaaatgaaactgcaatttattcatatcaggattatcaataccatatttttgaaaaagccgtttctgtaatgaaggagaaaactcaccgaggcagttccataggatggcaagatcctggtatcggtctgcgattccgactcgtccaacatcaatacaacctattaatttcccctcgtcaaaaataaggttatcaagtgagaaatcaccatgagtgacgactgaatccggtgagaatggcaaaagtttatgcatttctttccagacttgttcaacaggccagccattacgctcgtcatcaaaatcactcgcatcaaccaaaccgttattcattcgtgattgcgcctgagcgagacgaaatacgcgatcgctgttaaaaggacaattacaaacaggaatcgaatgcaaccggcgcaggaacactgccagcgcatcaacaatattttcacctgaatcaggatattcttctaatacctggaatgctgtttttccggggatcgcagtggtgagtaaccatgcatcatcaggagtacggataaaatgcttgatggtcggaagaggcataaattccgtcagccagtttagtctgaccatctcatctgtaacatcattggcaacgctacctttgccatgtttcagaaacaactctggcgcatcgggcttcccatacaagcgatagattgtcgcacctgattgcccgacattatcgcgagcccatttatacccatataaatcagcatccatgttggaatttaatcgcggcctcgacgtttcccgttgaatatggctcataacaccccttgtattactgtttatgtaagcagacagttttattgttcatgatgatatatttttatcttgtgcaatgtaacatcagagattttgagacacgggccagagctgca

SEQ ID NO: 250 - DNA, 5505 bp, synthetic construct; identical to SEQ ID NO: 106
  source 1..5505: mol_type = other DNA

SEQ ID NO: 251 - DNA, 2208 bp, synthetic construct
  source 1..2208: mol_type = other DNA
atggctgccgatggttatcttccagattggctcgaggacaaccttagtgaaggaattcgcgagtggtgggctttgaaacctggagcccctcaacccaaggcaaatcaacaacatcaagacaacgctcgaggtcttgtgcttccgggttacaaataccttggacccggcaacggactcgacaagggggagccggtcaacgcagcagacgcggcggccctcgagcacgacaaggcctacgaccagcagctcaaggccggagacaacccgtacctcaagtacaaccacgccgacgccgagttccaggagcggctcaaagaagatacgtcttttgggggcaacctcgggcgagcagtcttccaggccaaaaagaggcttcttgaacctcttggtctggttgaggaagcggtaaagacggctcctggaaagaagaggcctgtagagcagtctcctcaggaaccggactcctccgcgggtattggcaaatcgggtgcacagcccgctaaaaagagactcaatttcggtcagactggcgacacagagtcagtcccagaccctcaaccaatcggagaacctcccgcagccccctcaggtgtgggatctcttacaatggcttcaggtggtggcgcaccagtggcagacaataacgaaggtgccgatggagtgggtagttcctcgggaaattggcattgcgattcccaatggctgggggacagagtcatcaccaccagcacccgaacctgggccctgcccacctacaacaatcacctctacaagcaaatctccaacagcacatctggaggatcttcaaatgacaacgcctacttcggctacagcaccccctgggggtattttgacttcaacagattccactgccacttctcaccacgtgactggcagcgactcatcaacaacaactggggattccggcctaagcgactcaacttcaagctcttcaacattcaggtcaaagaggttacggacaacaatggagtcaagaccatcgccaataaccttaccagcacggtccaggtcttcacggactcagactatcagctcccgtacgtgctcgggtcggctcacgagggctgcctcccgccgttcccagcggacgttttcatgattcctcagtacgggtatctgacgcttaatgatggaagccaggccgtgggtcgttcgtccttttactgcctggaatatttcccgtcgcaaatgctaagaacgggtaacaacttccagttcagctacgagtttgagaacgtacctttccatagcagctacgctcacagccaaagcctggaccgactaatgaatccactcatcgaccaatacttgtactatctctcaaagactattaacggttctggacagaatcaacaaacgctaaaattcagtgtggccggacccagcaacatggctgtccagggaagaaactacatacctggacccagctaccgacaacaacgtgtctcaaccactgtgactcaaaacaacaacagcgaatttgcttggcctggagcttcttcttgggctctcaatggacgtaatagcttgatgaatcctggacctgctatggccagccacaaagaaggagaggaccgtttctttcctttgtctggatctttaatttttggcaaacaaggaactggaagagacaacgtggatgcggacaaagtcatgataaccaacgaagaagaaattaaaactactaacccggtagcaacggagtcctatggacaagtggccacaaaccaccagagtgcccaagcacaggcgcagaccggctgggttcaaaaccaaggaatacttccgggtatggtttggcaggacagagatgtgtacctgcaaggacccatttgggccaaaattcctcacacggacggcaactttcacccttctccgctgatgggagggtttggaatgaagcacccgcctcctcagatcctcatcaaaaacacacctgtacctgcggatcctccaacggccttcaacaaggacaagctgaactctttcatcacccagtattctactggccaagtcagcgtggagatcgagtgggagctgcagaaggaaaacagcaagcgctggaacccggagatccagtacacttccaactattacaagtctaataatgttgaatttgctgttaatactgaaggtgtatatagtgaaccccgccccattggcaccagatacctgactcgtaatctg

SEQ ID NO: 252 - DNA, 4090 bp, synthetic construct
  source 1..4090: mol_type = other DNA
atgccggggttttacgagattgtgattaaggtccccagcgaccttgacgagcatctgcccggcatttctgacagctttgtgaactgggtggccgagaaggaatgggagttgccgccagattctgacatggatctgaatctgattgagcaggcacccctgaccgtggccgagaagctgcagcgcgactttctgacggaatggcgccgtgtgagtaaggccccggaggctcttttctttgtgcaatttgagaagggagagagctacttccacatgcacgtgctcgtggaaaccaccggggtgaaatccatggttttgggacgtttcctgagtcagattcgcgaaaaactgattcagagaatttaccgcgggatcgagccgactttgccaaactggttcgcggtcacaaagaccagaaatggcgccggaggcgggaacaaggtggtggatgagtgctacatccccaattacttgctccccaaaacccagcctgagctccagtgggcgtggactaatatggaacagtatttaagcgcctgtttgaatctcacggagcgtaaacggttggtggcgcagcatctgacgcacgtgtcgcagacgcaggagcagaacaaagagaatcagaatcccaattctgatgcgccggtgatcagatcaaaaacttcagccaggtacatggagctggtcgggtggctcgtggacaaggggattacctcggagaagcagtggatccaggaggaccaggcctcatacatctccttcaatgcggcctccaactcgcggtcccaaatcaaggctgccttggacaatgcgggaaagattatgagcctgactaaaaccgcccccgactacctggtgggccagcagcccgtggaggacatttccagcaatcggatttataaaattttggaactaaacgggtacgatccccaatatgcggcttccgtctttctgggatgggccacgaaaaagttcggcaagaggaacaccatctggctgtttgggcctgcaactaccgggaagaccaacatcgcggaggccatagcccacactgtgcccttctacgggtgcgtaaactggaccaatgagaactttcccttcaacgactgtgtcgacaagatggtgatctggtgggaggaggggaagatgaccgccaaggtcgtggagtcggccaaagccattctcggaggaagcaaggtgcgcgtggaccagaaatgcaagtcctcggcccagatagacccgactcccgtgatcgtcacctccaacaccaacatgtgcgccgtgattgacgggaactcaacgaccttcgaacaccagcagccgttgcaagaccggatgttcaaatttgaactcacccgccgtctggatcatgactttgggaaggtcaccaagcaggaagtcaaagactttttccggtgggcaaaggatcacgtggttgaggtggagcatgaattctacgtcaaaaagggtggagccaagaaaagacccgcccccagtgacgcagatataagtgagcccaaacgggtgcgcgagtcagttgcgcagccatcgacgtcagacgcggaagcttcgatcaactacgcagacaggtaccaaaacaaatgttctcgtcacgtgggcatgaatctgatgctgtttccctgcagacaatgcgagagaatgaatcagaattcaaatatctgcttcactcacggacagaaagactgtttagagtgctttcccgtgtcagaatctcaacccgtttctgtcgtcaaaaaggcgtatcagaaactgtgctacattcatcatatcatgggaaaggtgccagacgcttgcactgcctgcgatctggtcaatgtggatttggatgactgcatctttgaacaataaatgatttaaatcaggtatggctgccgatggttatcttccagattggctcgaggacaaccttagtgaaggaattcgcgagtggtgggctttgaaacctggagcccctcaacccaaggcaaatcaacaacatcaagacaacgctcgaggtcttgtgcttccgggttacaaataccttggacccggcaacggactcgacaagggggagccggtcaacgcagcagacgcggcggccctcgagcacgacaaggcctacgaccagcagctcaaggccggagacaacccgtacctcaagtacaaccacgccgacgccgagttccaggagcggctcaaagaagatacgtcttttgggggcaacctcgggcgagcagtcttccaggccaaaaagaggcttcttgaacctcttggtctggttgaggaagcggtaaagacggctcctggaaagaagaggcctgtagagcagtctcctcaggaaccggactcctccgcgggtattggcaaatcgggtgcacagcccgctaaaaagagactcaatttcggtcagactggcgacacagagtcagtcccagaccctcaaccaatcggagaacctcccgcagccccctcaggtgtgggatctcttacaatggcttcaggtggtggcgcaccagtggcagacaataacgaaggtgccgatggagtgggtagttcctcgggaaattggcattgcgattcccaatggctgggggacagagtcatcaccaccagcacccgaacctgggccctgcccacctacaacaatcacctctacaagcaaatctccaacagcacatctggaggatcttcaaatgacaacgcctacttcggctacagcaccccctgggggtattttgacttcaacagattccactgccacttctcaccacgtgactggcagcgactcatcaacaacaactggggattccggcctaagcgactcaacttcaagctcttcaacattcaggtcaaagaggttacggacaacaatggagtcaagaccatcgccaataaccttaccagcacggtccaggtcttcacggactcagactatcagctcccgtacgtgctcgggtcggctcacgagggctgcctcccgccgttcccagcggacgttttcatgattcctcagtacgggtatctgacgcttaatgatggaagccaggccgtgggtcgttcgtccttttactgcctggaatatttcccgtcgcaaatgctaagaacgggtaacaacttccagttcagctacgagtttgagaacgtacctttccatagcagctacgctcacagccaaagcctggaccgactaatgaatccactcatcgaccaatacttgtactatctctcaaagactattaacggttctggacagaatcaacaaacgctaaaattcagtgtggccggacccagcaacatggctgtccagggaagaaactacatacctggacccagctaccgacaacaacgtgtctcaaccactgtgactcaaaacaacaacagcgaatttgcttggcctggagcttcttcttgggctctcaatggacgtaatagcttgatgaatcctggacctgctatggccagccacaaagaaggagaggaccgtttctttcctttgtctggatctttaatttttggcaaacaaggaactggaagagacaacgtggatgcggacaaagtcatgataaccaacgaagaagaaattaaaactactaacccggtagcaacggagtcctatggacaagtggccacaaaccaccagagtgcccaagcacaggcgcagaccggctgggttcaaaaccaaggaatacttccgggtatggtttggcaggacagagatgtgtacctgcaaggacccatttgggccaaaattcctcacacggacggcaactttcacccttctccgctgatgggagggtttggaatgaagcacccgcctcctcagatcctcatcaaaaacacacctgtacctgcggatcctccaacggccttcaacaaggacaagctgaactctttcatcacccagtattctactggccaagtcagcgtggagatcgagtgggagctgcagaaggaaaacagcaagcgctggaacccggagatccagtacacttccaactattacaagtctaataatgttgaatttgctgttaatactgaaggtgtatatagtgaaccccgccccattggcaccagatacctgactcgtaatctg

SEQ ID NO: 253 - DNA, 9819 bp, synthetic construct
  source 1..9819: mol_type = other DNA
atgccggggttttacgagattgtgattaaggtccccagcgaccttgacgagcatctgcccggcatttctgacagctttgtgaactgggtggccgagaaggaatgggagttgccgccagattctgacatggatctgaatctgattgagcaggcacccctgaccgtggccgagaagctgcagcgcgactttctgacggaatggcgccgtgtgagtaaggccccggaggctcttttctttgtgcaatttgagaagggagagagctacttccacatgcacgtgctcgtggaaaccaccggggtgaaatccatggttttgggacgtttcctgagtcagattcgcgaaaaactgattcagagaatttaccgcgggatcgagccgactttgccaaactggttcgcggtcacaaagaccagaaatggcgccggaggcgggaacaaggtggtggatgagtgctacatccccaattacttgctccccaaaacccagcctgagctccagtgggcgtggactaatatggaacagtatttaagcgcctgtttgaatctcacggagcgtaaacggttggtggcgcagcatctgacgcacgtgtcgcagacgcaggagcagaacaaagagaatcagaatcccaattctgatgcgccggtgatcagatcaaaaacttcagccaggtacatggagctggtcgggtggctcgtggacaaggggattacctcggagaagcagtggatccaggaggaccaggcctcatacatctccttcaatgcggcctccaactcgcggtcccaaatcaaggctgccttggacaatgcgggaaagattatgagcctgactaaaaccgcccccgactacctggtgggccagcagcccgtggaggacatttccagcaatcggatttataaaattttggaactaaacgggtacgatccccaatatgcggcttccgtctttctgggatgggccacgaaaaagttcggcaagaggaacaccatctggctgtttgggcctgcaactaccgggaagaccaacatcgcggaggccatagcccacactgtgcccttctacgggtgcgtaaactggaccaatgagaactttcccttcaacgactgtgtcgacaagatggtgatctggtgggaggaggggaagatgaccgccaaggtcgtggagtcggccaaagccattctcggaggaagcaaggtgcgcgtggaccagaaatgcaagtcctcggcccagatagacccgactcccgtgatcgtcacctccaacaccaacatgtgcgccgtgattgacgggaactcaacgaccttcgaacaccagcagccgttgcaagaccggatgttcaaatttgaactcacccgccgtctggatcatgactttgggaaggtcaccaagcaggaagtcaaagactttttccggtgggcaaaggatcacgtggttgaggtggagcatgaattctacgtcaaaaagggtggagccaagaaaagacccgcccccagtgacgcagatataagtgagcccaaacgggtgcgcgagtcagttgcgcagccatcgacgtcagacgcggaagcttcgatcaactacgcagacaggtaccaaaacaaatgttctcgtcacgtgggcatgaatctgatgctgtttccctgcagacaatgcgagagaatgaatcagaattcaaatatctgcttcactcacggacagaaagactgtttagagtgctttcccgtgtcagaatctcaacccgtttctgtcgtcaaaaaggcgtatcagaaactgtgctacattcatcatatcatgggaaaggtgccagacgcttgcactgcctgcgatctggtcaatgtggatttggatgactgcatctttgaacaataaatgatttaaatcaggtatggctgccgatggttatcttccagattggctcgaggacaaccttagtgaaggaattcgcgagtggtgggctttgaaacctggagcccctcaacccaaggcaaatcaacaacatcaagacaacgctcgaggtcttgtgcttccgggttacaaataccttggacccggcaacggactcgacaagggggagccggtcaacgcagcagacgcggcggccctcgagcacgacaaggcctacgaccagcagctcaaggccggagacaacccgtacctcaagtacaaccacgccgacgccgagttccaggagcggctcaaagaagatacgtcttttgggggcaacctcgggcgagcagtcttccaggccaaaaagaggcttcttgaacctcttggtctggttgaggaagcggtaaagacggctcctggaaagaagaggcctgtagagcagtctcctcaggaaccggactcctccgcgggtattggcaaatcgggtgcacagcccgctaaaaagagactcaatttcggtcagactggcgacacagagtcagtcccagaccctcaaccaatcggagaacctcccgcagccccctcaggtgtgggatctcttacaatggcttcaggtggtggcgcaccagtggcagacaataacgaaggtgccgatggagtgggtagttcctcgggaaattggcattgcgattcccaatggctgggggacagagtcatcaccaccagcacccgaacctgggccctgcccacctacaacaatcacctctacaagcaaatctccaacagcacatctggaggatcttcaaatgacaacgcctacttcggctacagcaccccctgggggtattttgacttcaacagattccactgccacttctcaccacgtgactggcagcgactcatcaacaacaactggggattccggcctaagcgactcaacttcaagctcttcaacattcaggtcaaagaggttacggacaacaatggagtcaagaccatcgccaataaccttaccagcacggtccaggtcttcacggactcagactatcagctcccgtacgtgctcgggtcggctcacgagggctgcctcccgccgttcccagcggacgttttcatgattcctcagtacgggtatctgacgcttaatgatggaagccaggccgtgggtcgttcgtccttttactgcctggaatatttcccgtcgcaaatgctaagaacgggtaacaacttccagttcagctacgagtttgagaacgtacctttccatagcagctacgctcacagccaaagcctggaccgactaatgaatccactcatcgaccaatacttgtactatctctcaaagactattaacggttctggacagaatcaacaaacgctaaaattcagtgtggccggacccagcaacatggctgtccagggaagaaactacatacctggacccagctaccgacaacaacgtgtctcaaccactgtgactcaaaacaacaacagcgaatttgcttggcctggagcttcttcttgggctctcaatggacgtaatagcttgatgaatcctggacctgctatggccagccacaaagaaggagaggaccgtttctttcctttgtctggatctttaatttttggcaaacaaggaactggaagagacaacgtggatgcggacaaagtcatgataaccaacgaagaagaaattaaaactactaacccggtagcaacggagtcctatggacaagtggccacaaaccaccagagtgcccaagcacaggcgcagaccggctgggttcaaaaccaaggaatacttccgggtatggtttggcaggacagagatgtgtacctgcaaggacccatttgggccaaaattcctcacacggacggcaactttcacccttctccgctgatgggagggtttggaatgaagcacccgcctcctcagatcctcatcaaaaacacacctgtacctgcggatcctccaacggccttcaacaaggacaagctgaactctttcatcacccagtattctactggccaagtcagcgtggagatcgagtgggagctgcagaaggaaaacagcaagcgctggaacccggagatccagtacacttccaactattacaagtctaataatgttgaatttgctgttaatactgaaggtgtatatagtgaaccccgccccattggcaccagatacctgactcgtaatctgtaattgcctgttaatcaataaaccggttgattcgtttcagttgaactttggtctctgcgaagggcgaattcgtttaaacctgcaggactagagccgaattctgcatcgcgatagggataacagggtaataaataatgtactagagacactttcaataaaggcaaatgcttttatttgtacactctcgggtgattatttacccccacccttgccgtctgcgccgttcagaagtcgaaggggttctgtctggcatcggaatgggccacgggcagagacacgttccggtactggtgcttggtggaccacttgaactcaggcacgaccattctaggcagctctgtgaagttctcgctccacaggctccgcaccatcaccagggcgttcagcaggtcaggggcgctgattttgaagtcgcagttaggtccgccgccctgggctctgctgtttctgtacacagggttgcagcactggaacacaataagagcagggtggtgcacgctggccagcacagacttgtcgctgatcaggtcggcgtcgagatcctcggcgttagacaaggcaaaaggggtcagcttgggcagctggcggcccaggaaaggggcgtggccgggcttgctattgcactcgcatctcagaggcatcagcaggtggccgtggccggtctgggcgttggggtacagggcctgcataaaggccttgatctgtttgaaggccacttgggccttggcgccttcggagaagaacatgccgcagcttttgccgctgaactggttggcggggcaggcggcgtcgtgcacacaacaccgggcgtcggtattgctgatctgcaccacgtttctgccccatctgttcttcacgatcttggccttgctgctctgctctttcagggccctctggccgttctcagaggtgacgtccatctcgatcacatgttccttgttgatcatgatgctgccgtgcagacacttcagctcgccctcgatttccgcgcatctgtgcagccacagggcacaaccggtaggctcgtggtgcttgtatgtcacctcagcaaaagattgcaggtaggcttgcaggaatctgcccatcatggtcacgaaggtcttgttggaggtaaaagtcagctgcagtcctctgtgttcctcgttcagccatgtcttgcacacggcggccagagcctcgacctgatctggcagcagcttgaaattagccttcaggtcgttgtccacgtgatacttatccatcagtgctctggcggcttccatgcccttctcccaggcggaaacgatgggcacgctcagggggttcatcacggtgatctcgctttcagcttctgaaggttcctcctcttcctcctgtgttctcatgccccgagccacggggtcgtcctcattcagtctccgcacggttctttttcctccctttccgtgcttaatcagtacaggaggattagagaagcccaccatctggagggcgacgtcctccctttcttcttcgctatccacgatcacttctgggctggggggccgttcaggctttgggctaggccgtttttttttcttcttaggggcgatagccagatcagcggcgcttgtagagggccgaggactaggggttctaggcacgagggcgtcctggctgctgtcctcctcatcctcgctctcgatccgtctccgcattctcttcttagggggggcccgcggagggggagggctagggctaggggacgacacatcttccatggttggaggtctgcgagcagcgcctctgcctctctctggtgttgtctcgcgctgttcttcctctctagaggccatttccttctcctataggcagaaaaagatcgttgaaactcactccggggctgtggacgtcggcttaccttcgcaaatttgtacctgaggactaccacgcccacgagattaggttctacgaagaccaatcccgcccgcctaatgcggagcttaccgcctgcgtcattacccagggccacattcttggccaattgcaagccatcaacaaagcccgccaagagtttctgctacgaaagggacggggggtttacttggacccccagtccggcgaggagctcaacccaatccccccgccgccgcagccctatcagcagcagccgcgggcccttgcttcccaggatggcacccaaaaagaagctgcagctgccgccgccacccacggacgaggaggaatactgggacagtcaggcagaggaggttttggacgaggaggaggaggacatgatggaagactgggagagcctagacgaggaagcttccgaggtcgaagaggtgtcagacgaaacaccgtcaccctcggtcgcattcccctcgccggcgccccagaaatcggcaaccggttccagcatggctacaacctccgctcctcaggcgccgccggcactgcccgttcgccgacccaaccgtagatgggacaccactggaaccagggccggtaagtccaagcagccgccgccgttagcccaagagcaacaacagcgccaaggctaccgctcatggcgcgggcacaagaacgccatagttgcttgcttgcaagactgtgggggcaacatctccttcgcccgccgctttcttctctaccatcacggcgtggccttcccccgtaacatcctgcattactaccgtcatctctacagcccatactgcaccggcggcagcggcagcaacagcagcggccacacagaagcaaaggcgaccggatagcaagactctgacaaagcccaagaaatccacagcggcggcagcagcaggaggaggagcgctgcgtctggcgcccaacgaacccgtatcgacccgcgagcttagaaacaggatttttcccactctgtatgctatatttcaacagagcaggggccaagaacaagagctgaaaataaaaaacaggtctctgcgatccctcacccgcagctgcctgtatcacaaaagcgaagatcagcttcggcgcacgctggaagacgcggaggctctcttcagtaaatactgcgcgctgactcttaaggactagtttcgcgccctttctcaaatttaagcgcgaaaactacgtcatctccagcggccacacccggcgccagcacctgttgtcagcgccattttttagggcggagtaacttgtatgtgttgggaattgtagttttcttaaaatgggaagtgacgtaacgtgggaaaacggaagtgacgatttgaggaagttgtgggttttttggctttcgtttctgggcgtaggttcgcgtgcggttttctgggtgttttttgtggactttaaccgttacgtcattttttagtcctatatatactcgctctgcacttggcccttttttacactgtgactgattgagctggtgccgtgtcgagtggtgtttttttaataggttttcttttttactggtaaggctgactgttatgactacgtccggcgttccatttggcatgacactacgaccaacacgatctcggttgtctcggcgcactccgtacagtagggatcgtctacctccttttgagacagaaacccgcgctaccatactggaggatcatccgctgctgcccgaatgtaacactttgacaatgcacaacgtgagttacgtgcgaggtcttccctgcagtgtgggatttacgctgattcaggaatgggttgttccctgggatatggttctaacgcgggaggagcttgtaatcctgaggaagtgtatgcacgtgtgcctgtgttgtgccaacattgatatcatgacgagcatgatgatccatggttacgagtcctgggctctccactgtcattgttccagtcccggttccctgcagtgtatagccggcgggcaggttttggccagctggtttaggatggtggtggatggcgccatgtttaatcagaggtttatatggtaccgggaggtggtgaattacaacatgccaaaagaggtaatgtttatgtccagcgtgtttatgaggggtcgccacttaatctacctgcgcttgtggtatgatggccacgtgggttctgtggtccccgccatgagctttggatacagcgccttgcactgtgggattttgaacaatattgtggtgctgtgctgcagttactgtgctgatttaagtgagatcagggtgcgctgctgtgcccggaggacaaggcgccttatgctgcgggcggtgcgaatcatcgctgaggagaccactgccatgttgtattcctgcaggacggagcggcggcggcagcagtttattcgcgcgctgctgcagcaccaccgccctatcctgatgcacgattatgactctacccccatgtaggcgtggacttctccttcgccgcccgttaagcaaccgcaagttggacagcagcctgtggctcagcagctggacagcgacatgaacttaagtgagctgcccggggagtttattaatatcactgatgagcgtttggctcgacaggaaaccgtgtggaatataacacctaagaatatgtctgttacccatgatatgatgctttttaaggccagccggggagaaaggactgtgtactctgtgtgttgggagggaggtggcaggttgaatactagggttctgtgagtttgattaaggtacggtgatctgtataagctatgtggtggtggggctatactactgaatgaaaaatgacttgaaattttctgcaattgaaaaataaacacgttgaaacataacacaaacgattctttattcttgggcaatgtatgaaaaagtgtaagaggatgtggcaaatatttcattaatgtagttgtggccagaccagtcccatgaaaatgacatagagtatgcacttggagttgtgtctcctgtttcctgtgtaccgtttagtgtaatggttagtgttacaggtttagttttgtctccgtttaagtaaacttgactgacaatgttacttttggcagttttaccgtgagattttggataagctgataggttaggcataaatccaacagcgtttgtataggctgtcgcccctcctgacgcggtaggaggaggggagggtgccctgcatgtctgccgctgctcttgctcttgccgctgctgaggaggggggcgcatctgccgcagcaccggatgcatctgggaaaagcaaaaaaggggctcgtccctgtttccggaggaatttgcaagcggggtcttgcatgacggggaggcaaacccccgttcgccgcagtccggccggtccgagactcgaaccgggggtcccgcgactcaacccttggaaaataaccctccggctacagggagcgagccacttaatgctttcgctttccagcctaaccgcttacgctgcgcgcggccagtggccaaaaaagctagcgcagcagccgccgcgcctggaaggaagccaaaaggagcactcccccgttgtctgacgtcgcacacctgggttcgacacgcgggcggtaaccgcatggatcacggcggacggccggatacggggctcgaaccccggtcgtccgccatgatacccttgcgaatttatccaccagaccacggaagagtgcccgcttacaggctctccttttgcacggtctagagcgtcaacgattgcgcgcgcctgaccggccagagcgtcccgaccatggagcactttttgccgctgcgcaacatctggaaccgcgtccgcgactttccgcgcgcctccaccaccgccgccggcatcacctggatgtccaggtacatctacggata

SEQ ID NO: 254 - DNA, 12582 bp, synthetic construct
  source 1..12582: mol_type = other DNA
tcgcgcgtttcggtgatgacggtgaaaacctctgacacatgcagctcccggagacggtcacagcttgtctgtaagcggatgccgggagcagacaagcccgtcagggcgcgtcagcgggtgttggcgggtgtcggggctggcttaactatgcggcatcagagcagattgtactgagagtgcaccatatgcggtgtgaaataccgcacagatgcgtaaggagaaaataccgcatcaggcgccattcgccattcaggctgcgcaactgttgggaagggcgatcggtgcgggcctcttcgctattacgccagctggcgaaagggggatgtgctgcaaggcgattaagttgggtaacgccagggttttcccagtcacgacgttgtaaaacgacggccagagaattccgcagggtctccattttgaagcgggaggtttgaacgcgcagccgccatgccggggttttacgagattgtgattaaggtccccagcgaccttgacgagcatctgcccggcatttctgacagctttgtgaactgggtggccgagaaggaatgggagttgccgccagattctgacatggatctgaatctgattgagcaggcacccctgaccgtggccgagaagctgcagcgcgactttctgacggaatggcgccgtgtgagtaaggccccggaggctcttttctttgtgcaatttgagaagggagagagctacttccacatgcacgtgctcgtggaaaccaccggggtgaaatccatggttttgggacgtttcctgagtcagattcgcgaaaaactgattcagagaatttaccgcgggatcgagccgactttgccaaactggttcgcggtcacaaagaccagaaatggcgccggaggcgggaacaaggtggtggatgagtgctacatccccaattacttgctccccaaaacccagcctgagctccagtgggcgtggactaatatggaacagtatttaagcgcctgtttgaatctcacggagcgtaaacggttggtggcgcagcatctgacgcacgtgtcgcagacgcaggagcagaacaaagagaatcagaatcccaattctgatgcgccggtgatcagatcaaaaacttcagccaggtacatggagctggtcgggtggctcgtggacaaggggattacctcggagaagcagtggatccaggaggaccaggcctcatacatctccttcaatgcggcctccaactcgcggtcccaaatcaaggctgccttggacaatgcgggaaagattatgagcctgactaaaaccgcccccgactacctggtgggccagcagcccgtggaggacatttccagcaatcggatttataaaattttggaactaaacgggtacgatccccaatatgcggcttccgtctttctgggatgggccacgaaaaagttcggcaagaggaacaccatctggctgtttgggcctgcaactaccgggaagaccaacatcgcggaggccatagcccacactgtgcccttctacgggtgcgtaaactggaccaatgagaactttcccttcaacgactgtgtcgacaagatggtgatctggtgggaggaggggaagatgaccgccaaggtcgtggagtcggccaaagccattctcggaggaagcaaggtgcgcgtggaccagaaatgcaagtcctcggcccagatagacccgactcccgtgatcgtcacctccaacaccaacatgtgcgccgtgattgacgggaactcaacgaccttcgaacaccagcagccgttgcaagaccggatgttcaaatttgaactcacccgccgtctggatcatgactttgggaaggtcaccaagcaggaagtcaaagactttttccggtgggcaaaggatcacgtggttgaggtggagcatgaattctacgtcaaaaagggtggagccaagaaaagacccgcccccagtgacgcagatataagtgagcccaaacgggtgcgcgagtcagttgcgcagccatcgacgtcagacgcggaagcttcgatcaactacgcagacaggtaccaaaacaaatgttctcgtcacgtgggcatgaatctgatgctgtttccctgcagacaatgcgagagaatgaatcagaattcaaatatctgcttcactcacggacagaaagactgtttagagtgctttcccgtgtcagaatctcaacccgtttctgtcgtcaaaaaggcgtatcagaaactgtgctacattcatcatatcatgggaaaggtgccagacgcttgcactgcctgcgatctggtcaatgtggatttggatgactgcatctttgaacaataaatgatttaaatcaggtatggctgccgatggttatcttccagattggctcgaggacaaccttagtgaaggaattcgcgagtggtgggctttgaaacctggagcccctcaacccaaggcaaatcaacaacatcaagacaacgctcgaggtcttgtgcttccgggttacaaataccttggacccggcaacggactcgacaagggggagccggtcaacgcagcagacgcggcggccctcgagcacgacaaggcctacgaccagcagctcaaggccggagacaacccgtacctcaagtacaaccacgccgacgccgagttccaggagcggctcaaagaagatacgtcttttgggggcaacctcgggcgagcagtcttccaggccaaaaagaggcttcttgaacctcttggtctggttgaggaagcggtaaagacggctcctggaaagaagaggcctgtagagcagtctcctcaggaaccggactcctccgcgggtattggcaaatcgggtgcacagcccgctaaaaagagactcaatttcggtcagactggcgacacagagtcagtcccagaccctcaaccaatcggagaacctcccgcagccccctcaggtgtgggatctcttacaatggcttcaggtggtggcgcaccagtggcagacaataacgaaggtgccgatggagtgggtagttcctcgggaaattggcattgcgattcccaatggctgggggacagagtcatcaccaccagcacccgaacctgggccctgcccacctacaacaatcacctctacaagcaaatctccaacagcacatctggaggatcttcaaatgacaacgcctacttcggctacagcaccccctgggggtattttgacttcaacagattccactgccacttctcaccacgtgactggcagcgactcatcaacaacaactggggattccggcctaagcgactcaacttcaagctcttcaacattcaggtcaaagaggttacggacaacaatggagtcaagaccatcgccaataaccttaccagcacggtccaggtcttcacggactcagactatcagctcccgtacgtgctcgggtcggctcacgagggctgcctcccgccgttcccagcggacgttttcatgattcctcagtacgggtatctgacgcttaatgatggaagccaggccgtgggtcgttcgtccttttactgcctggaatatttcccgtcgcaaatgctaagaacgggtaacaacttccagttcagctacgagtttgagaacgtacctttccatagcagctacgctcacagccaaagcctggaccgactaatgaatccactcatcgaccaatacttgtactatctctcaaagactattaacggttctggacagaatcaacaaacgctaaaattcagtgtggccggacccagcaacatggctgtccagggaagaaactacatacctggacccagctaccgacaacaacgtgtctcaaccactgtgactcaaaacaacaacagcgaatttgcttggcctggagcttcttcttgggctctcaatggacgtaatagcttgatgaatcctggacctgctatggccagccacaaagaaggagaggaccgtttctttcctttgtctggatctttaatttttggcaaacaaggaactggaagagacaacgtggatgcggacaaagtcatgataaccaacgaagaagaaattaaaactactaacccggtagcaacggagtcctatggacaagtggccacaaaccaccagagtgcccaagcacaggcgcagaccggctgggttcaaaaccaaggaatacttccgggtatggtttggcaggacagagatgtgtacctgcaaggacccatttgggccaaaattcctcacacggacggcaactttcacccttctccgctgatgggagggtttggaatgaagcacccgcctcctcagatcctcatcaaaaacacacctgtacctgcggatcctccaacggccttcaacaaggacaagctgaactctttcatcacccagtattctactggccaagtcagcgtggagatcgagtgggagctgcagaaggaaaacagcaagcgctggaacccggagatccagtacacttccaactattacaagtctaataatgttgaatttgctgttaatactgaaggtgtatatagtgaaccccgccccattggcaccagatacctgactcgtaatctgtaattgcctgttaatcaataaaccggttgattcgtttcagttgaactttggtctctgcgaagggcgaattcgtttaaacctgcaggactagagccgaattctgcatcgcgatagggataacagggtaataaataatgtactagagacactttcaataaaggcaaatgcttttatttgtacactctcgggtgattatttacccccacccttgccgtctgcgccgttcagaagtcgaaggggttctgtctggcatcggaatgggccacgggcagagacacgttccggtactggtgcttggtggaccacttgaactcaggcacgaccattctaggcagctctgtgaagttctcgctccacaggctccgcaccatcaccagggcgttcagcaggtcaggggcgctgattttgaagtcgcagttaggtccgccgccctgggctctgctgtttctgtacacagggttgcagcactggaacacaataagagcagggtggtgcacgctggccagcacagacttgtcgctgatcaggtcggcgtcgagatcctcggcgttagacaaggcaaaaggggtcagcttgggcagctggcggcccaggaaaggggcgtggccgggcttgctattgcactcgcatctcagaggcatcagcaggtggccgtggccggtctgggcgttggggtacagggcctgcataaaggccttgatctgtttgaaggccacttgggccttggcgccttcggagaagaacatgccgcagcttttgccgctgaactggttggcggggcaggcggcgtcgtgcacacaacaccgggcgtcggtattgctgatctgcaccacgtttctgccccatctgttcttcacgatcttggccttgctgctctgctctttcagggccctctggccgttctcagaggtgacgtccatctcgatcacatgttccttgttgatcatgatgctgccgtgcagacacttcagctcgccctcgatttccgcgcatctgtgcagccacagggcacaaccggtaggctcgtggtgcttgtatgtcacctcagcaaaagattgcaggtaggcttgcaggaatctgcccatcatggtcacgaaggtcttgttggaggtaaaagtcagctgcagtcctctgtgttcctcgttcagccatgtcttgcacacggcggccagagcctcgacctgatctggcagcagcttgaaattagccttcaggtcgttgtccacgtgatacttatccatcagtgctctggcggcttccatgcccttctcccaggcggaaacgatgggcacgctcagggggttcatcacggtgatctcgctttcagcttctgaaggttcctcctcttcctcctgtgttctcatgccccgagccacggggtcgtcctcattcagtctccgcacggttctttttcctccctttccgtgcttaatcagtacaggaggattagagaagcccaccatctggagggcgacgtcctccctttcttcttcgctatccacgatcacttctgggctggggggccgttcaggctttgggctaggccgtttttttttcttcttaggggcgatagccagatcagcggcgcttgtagagggccgaggactaggggttctaggcacgagggcgtcctggctgctgtcctcctcatcctcgctctcgatccgtctccgcattctcttcttagggggggcccgcggagggggagggctagggctaggggacgacacatcttccatggttggaggtctgcgagcagcgcctctgcctctctctggtgttgtctcgcgctgttcttcctctctagaggccatttccttctcctataggcagaaaaagatcgttgaaactcactccggggctgtggacgtcggcttaccttcgcaaatttgtacctgaggactaccacgcccacgagattaggttctacgaagaccaatcccgcccgcctaatgcggagcttaccgcctgcgtcattacccagggccacattcttggccaattgcaagccatcaacaaagcccgccaagagtttctgctacgaaagggacggggggtttacttggacccccagtccggcgaggagctcaacccaatccccccgccgccgcagccctatcagcagcagccgcgggcccttgcttcccaggatggcacccaaaaagaagctgcagctgccgccgccacccacggacgaggaggaatactgggacagtcaggcagaggaggttttggacgaggaggaggaggacatgatggaagactgggagagcctagacgaggaagcttccgaggtcgaagaggtgtcagacgaaacaccgtcaccctcggtcgcattcccctcgccggcgccccagaaatcggcaaccggttccagcatggctacaacctccgctcctcaggcgccgccggcactgcccgttcgccgacccaaccgtagatgggacaccactggaaccagggccggtaagtccaagcagccgccgccgttagcccaagagcaacaacagcgccaaggctaccgctcatggcgcgggcacaagaacgccatagttgcttgcttgcaagactgtgggggcaacatctccttcgcccgccgctttcttctctaccatcacggcgtggccttcccccgtaacatcctgcattactaccgtcatctctacagcccatactgcaccggcggcagcggcagcaacagcagcggccacacagaagcaaaggcgaccggatagcaagactctgacaaagcccaagaaatccacagcggcggcagcagcaggaggaggagcgctgcgtctggcgcccaacgaacccgtatcgacccgcgagcttagaaacaggatttttcccactctgtatgctatatttcaacagagcaggggccaagaacaagagctgaaaataaaaaacaggtctctgcgatccctcacccgcagctgcctgtatcacaaaagcgaagatcagcttcggcgcacgctggaagacgcggaggctctcttcagtaaatactgcgcgctgactcttaaggactagtttcgcgccctttctcaaatttaagcgcgaaaactacgtcatctccagcggccacacccggcgccagcacctgttgtcagcgccattttttagggcggagtaacttgtatgtgttgggaattgtagttttcttaaaatgggaagtgacgtaacgtgggaaaacggaagtgacgatttgaggaagttgtgggttttttggctttcgtttctgggcgtaggttcgcgtgcggttttctgggtgttttttgtggactttaaccgttacgtcattttttagtcctatatatactcgctctgcacttggcccttttttacactgtgactgattgagctggtgccgtgtcgagtggtgtttttttaataggttttcttttttactggtaaggctgactgttatgactacgtccggcgttccatttggcatgacactacgaccaacacgatctcggttgtctcggcgcactccgtacagtagggatcgtctacctccttttgagacagaaacccgcgctaccatactggaggatcatccgctgctgcccgaatgtaacactttgacaatgcacaacgtgagttacgtgcgaggtcttccctgcagtgtgggatttacgctgattcaggaatgggttgttccctgggatatggttctaacgcgggaggagcttgtaatcctgaggaagtgtatgcacgtgtgcctgtgttgtgccaacattgatatcatgacgagcatgatgatccatggttacgagtcctgggctctccactgtcattgttccagtcccggttccctgcagtgtatagccggcgggcaggttttggccagctggtttaggatggtggtggatggcgccatgtttaatcagaggtttatatggtaccgggaggtggtgaattacaacatgccaaaagaggtaatgtttatgtccagcgtgtttatgaggggtcgccacttaatctacctgcgcttgtggtatgatggccacgtgggttctgtggtccccgccatgagctttggatacagcgccttgcactgtgggattttgaacaatattgtggtgctgtgctgcagttactgtgctgatttaagtgagatcagggtgcgctgctgtgcccggaggacaaggcgccttatgctgcgggcggtgcgaatcatcgctgaggagaccactgccatgttgtattcctgcaggacggagcggcggcggcagcagtttattcgcgcgctgctgcagcaccaccgccctatcctgatgcacgattatgactctacccccatgtaggcgtggacttctccttcgccgcccgttaagcaaccgcaagttggacagcagcctgtggctcagcagctggacagcgacatgaacttaagtgagctgcccggggagtttattaatatcactgatgagcgtttggctcgacaggaaaccgtgtggaatataacacctaagaatatgtctgttacccatgatatgatgctttttaaggccagccggggagaaaggactgtgtactctgtgtgttgggagggaggtggcaggttgaatactagggttctgtgagtttgattaaggtacggtgatctgtataagctatgtggtggtggggctatactactgaatgaaaaatgacttgaaattttctgcaattgaaaaataaacacgttgaaacataacacaaacgattctttattcttgggcaatgtatgaaaaagtgtaagaggatgtggcaaatatttcattaatgtagttgtggccagaccagtcccatgaaaatgacatagagtatgcacttggagttgtgtctcctgtttcctgtgtaccgtttagtgtaatggttagtgttacaggtttagttttgtctccgtttaagtaaacttgactgacaatgttacttttggcagttttaccgtgagattttggataagctgataggttaggcataaatccaacagcgtttgtataggctgtcgcccctcctgacgcggtaggaggaggggagggtgccctgcatgtctgccgctgctcttgctcttgccgctgctgaggaggggggcgcatctgccgcagcaccggatgcatctgggaaaagcaaaaaaggggctcgtccctgtttccggaggaatttgcaagcggggtcttgcatgacggggaggcaaacccccgttcgccgcagtccggccggtccgagactcgaaccgggggtcccgcgactcaacccttggaaaataaccctccggctacagggagcgagccacttaatgctttcgctttccagcctaaccgcttacgctgcgcgcggccagtggccaaaaaagctagcgcagcagccgccgcgcctggaaggaagccaaaaggagcactcccccgttgtctgacgtcgcacacctgggttcgacacgcgggcggtaaccgcatggatcacggcggacggccggatacggggctcgaaccccggtcgtccgccatgatacccttgcgaatttatccaccagaccacggaagagtgcccgcttacaggctctccttttgcacggtctagagcgtcaacgattgcgcgcgcctgaccggccagagcgtcccgaccatggagcactttttgccgctgcgcaacatctggaaccgcgtccgcgactttccgcgcgcctccaccaccgccgccggcatcacctggatgtccaggtacatctacggatatggcaaacagctattatgggtattatgggtgcggccgcggatcccgggcccgtcgactgcagaggcctgcatgcaagcttggtgtaatcatggtcatagctgtttcctgtgtgaaattgttatccgctcacaattccacacaacatacgagccggaagcataaagtgtaaagcctggggtgcctaatgagtgagctaactcacattaattgcgttgcgctcactgcccgctttccagtcgggaaacctgtcgtgccagctgcattaatgaatcggccaacgcgcggggagaggcggtttgcgtattgggcgctcttccgcttcctcgctcactgactcgctgcgctcggtcgttcggctgcggcgagcggtatcagctcactcaaaggcggtaatacggttatccacagaatcaggggataacgcaggaaagaacatgtgagcaaaaggccagcaaaaggccaggaaccgtaaaaaggccgcgttgctggcgtttttccataggctccgcccccctgacgagcatcacaaaaatcgacgctcaagtcagaggtggcgaaacccgacaggactataaagataccaggcgtttccccctggaagctccctcgtgcgctctcctgttccgaccctgccgcttaccggatacctgtccgcctttctcccttcgggaagcgtggcgctttctcatagctcacgctgtaggtatctcagttcggtgtaggtcgttcgctccaagctgggctgtgtgcacgaaccccccgttcagcccgaccgctgcgccttatccggtaactatcgtcttgagtccaacccggtaagacacgacttatcgccactggcagcagccactggtaacaggattagcagagcgaggtatgtaggcggtgctacagagttcttgaagtggtggcctaactacggctacactagaagaacagtatttggtatctgcgctctgctgaagccagttaccttcggaaaaagagttggtagctcttgatccggcaaacaaaccaccgctggtagcggtggtttttttgtttgcaagcagcagattacgcgcagaaaaaaaggatctcaagaagatcctttgatcttttctacggggtctgacgctcagtggaacgaaaactcacgttaagggattttggtcatgagattatcaaaaaggatcttcacctagaaggtcctgtattagaggtcacgtgagtgttttgcgacattttgcgacaccatgtggtcacgctgggtatttaagcccgagtgagcacgcagggtctccattttgaagcgggaggtttgaacgcgcagccgccatccttttaaattaaaaatgaagttttaaatcaagcccaatctgaataatgttacaaccaattaaccaattctgattagaaaaactcatcgagcatcaaatgaaactgcaatttattcatatcaggattatcaataccatatttttgaaaaagccgtttctgtaatgaaggagaaaactcaccgaggcagttccataggatggcaagatcctggtatcggtctgcgattccgactcgtccaacatcaatacaacctattaatttcccctcgtcaaaaataaggttatcaagtgagaaatcaccatgagtgacgactgaatccggtgagaatggcaaaagtttatgcatttctttccagacttgttcaacaggccagccattacgctcgtcatcaaaatcactcgcatcaaccaaaccgttattcattcgtgattgcgcctgagcgagacgaaatacgcgatcgctgttaaaaggacaattacaaacaggaatcgaatgcaaccggcgcaggaacactgccagcgcatcaacaatattttcacctgaatcaggatattcttctaatacctggaatgctgtttttccggggatcgcagtggtgagtaaccatgcatcatcaggagtacggataaaatgcttgatggtcggaagaggcataaattccgtcagccagtttagtctgaccatctcatctgtaacatcattggcaacgctacctttgccatgtttcagaaacaactctggcgcatcgggcttcccatacaagcgatagattgtcgcacctgattgcccgacattatcgcgagcccatttatacccatataaatcagcatccatgttggaatttaatcgcggcctcgacgtttcccgttgaatatggctcataacaccccttgtattactgtttatgtaagcagacagttttattgttcatgatgatatatttttatcttgtgcaatgtaacatcagagattttgagacacgggccagagctgca

SEQ ID NO: 255 - DNA, 5505 bp, synthetic construct; identical to SEQ ID NO: 106
  source 1..5505: mol_type = other DNA

SEQ ID NO: 256 - DNA, 2217 bp, synthetic construct
  source 1..2217: mol_type = other DNA
atggctgccgatggttatcttccagattggctcgaggacaacctctctgagggcattcgcgagtggtgggcgctgaaaccaggagccccgaagcccaaagccaaccagcaaaagcaggacgacggccggggtctggtgcttccaggctacaagtacctcggacccttcaacggactcgacaagggggagcccgtgaacgcggcggacgcagcggccctcgagcacgacaaggcctacgaccagcagctgcaggcgggtgacaatccgtacctgaggtataaccacgccgacgccgagtttcaggagcgtctgcaagaagatacgtcttttgggggcaacctagggcgagcagtcttccaggccaagaagcgggttctcgaacctctcggtctggttgaggaaggcgctaagacggctcctggaaagaagagaccggtagagccatcaccccagcgttctccagactcctctacgggcatcggcaagaaaggccaacagcccgccagaaaaagactcaattttggtcagactggcgactcagagtcagttccagaccctcaacctctcggagaacctccagcagcgccctctggtgtgggacctaatacaatggctgcaggcggtggcgcaccaatggcagacaataacgaaggcgccgacggagtgggtagttcctcgggaaattggcattgcgattccacatggctgggcgacagagtcatcaccaccagcacccgaacctgggccctgcccacctacaacaaccacctctacaagcaaatctccaacgggacatcgggaggagccaccaacgacaacacctacttcggctacagcaccccctgggggtattttgactttaacagattccactgccacttttcaccacgtgactggcagcgactcatcaacaacaactggggattccggcccaagagactcagcttcaagctcttcaacatccaggtcaaggaggtcacgcagaatgaaggcaccaagaccatcgccaataacctcaccagcaccatccaggtgtttacggactcggagtaccagctgccgtacgttctcggctctgcccaccagggctgcctgcctccgttcccggcggacgtgttcatgattccccagtacggctacctaacactcaacaacggtagtcaggccgtgggacgctcctccttctactgcctggaatactttccttcgcagatgctgagaaccggcaacaacttccagtttacttacaccttcgaggacgtgcctttccacagcagctacgcccacagccagagcttggaccggctgatgaatcctctgattgaccagtacctgtactacttgtctcggactcaaacaacaggaggcacggcaaatacgcagactctgggcttcagccaaggtgggcctaatacaatggccaatcaggcaaagaactggctgccaggaccctgttaccgccaacaacgcgtctcaacgacaaccgggcaaaacaacaatagcaactttgcctggactgctgggaccaaataccatctgaatggaagaaattcattggctaatcctggcatcgctatggcaacacacaaagacgacgaggagcgtttttttcccagtaacgggatcctgatttttggcaaacaaaatgctgccagagacaatgcggattacagcgatgtcatgctcaccagcgaggaagaaatcaaaaccactaaccctgtggctacagaggaatacggtatcgtggcagataacttgcagcagcaaaacacggctcctcaaattggaactgtcaacagccagggggccttacccggtatggtctggcagaaccgggacgtgtacctgcagggtcccatctgggccaagattcctcacacggacggcaacttccacccgtctccgctgatgggcggctttggcctgaaacatcctccgcctcagatcctgatcaagaacacgcctgtacctgcggatcctccgaccaccttcaaccagtcaaagctgaactctttcatcacgcaatacagcaccggacaggtcagcgtggaaattgaatgggagctgcagaaggaaaacagcaagcgctggaaccccgagatccagtacacctccaactactacaaatctacaagtgtggactttgctgttaatacagaaggcgtgtactctgaaccccgccccattggcacccgttacctcacccgtaatctgtaa

SEQ ID NO: 257 - DNA, 4099 bp, synthetic construct
  source 1..4099: mol_type = other DNA
atgccggggttttacgagattgtgattaaggtccccagcgaccttgacgagcatctgcccggcatttctgacagctttgtgaactgggtggccgagaaggaatgggagttgccgccagattctgacatggatctgaatctgattgagcaggcacccctgaccgtggccgagaagctgcagcgcgactttctgacggaatggcgccgtgtgagtaaggccccggaggctcttttctttgtgcaatttgagaagggagagagctacttccacatgcacgtgctcgtggaaaccaccggggtgaaatccatggttttgggacgtttcctgagtcagattcgcgaaaaactgattcagagaatttaccgcgggatcgagccgactttgccaaactggttcgcggtcacaaagaccagaaatggcgccggaggcgggaacaaggtggtggatgagtgctacatccccaattacttgctccccaaaacccagcctgagctccagtgggcgtggactaatatggaacagtatttaagcgcctgtttgaatctcacggagcgtaaacggttggtggcgcagcatctgacgcacgtgtcgcagacgcaggagcagaacaaagagaatcagaatcccaattctgatgcgccggtgatcagatcaaaaacttcagccaggtacatggagctggtcgggtggctcgtggacaaggggattacctcggagaagcagtggatccaggaggaccaggcctcatacatctccttcaatgcggcctccaactcgcggtcccaaatcaaggctgccttggacaatgcgggaaagattatgagcctgactaaaaccgcccccgactacctggtgggccagcagcccgtggaggacatttccagcaatcggatttataaaattttggaactaaacgggtacgatccccaatatgcggcttccgtctttctgggatgggccacgaaaaagttcggcaagaggaacaccatctggctgtttgggcctgcaactaccgggaagaccaacatcgcggaggccatagcccacactgtgcccttctacgggtgcgtaaactggaccaatgagaactttcccttcaacgactgtgtcgacaagatggtgatctggtgggaggaggggaagatgaccgccaaggtcgtggagtcggccaaagccattctcggaggaagcaaggtgcgcgtggaccagaaatgcaagtcctcggcccagatagacccgactcccgtgatcgtcacctccaacaccaacatgtgcgccgtgattgacgggaactcaacgaccttcgaacaccagcagccgttgcaagaccggatgttcaaatttgaactcacccgccgtctggatcatgactttgggaaggtcaccaagcaggaagtcaaagactttttccggtgggcaaaggatcacgtggttgaggtggagcatgaattctacgtcaaaaagggtggagccaagaaaagacccgcccccagtgacgcagatataagtgagcccaaacgggtgcgcgagtcagttgcgcagccatcgacgtcagacgcggaagcttcgatcaactacgcagacaggtaccaaaacaaatgttctcgtcacgtgggcatgaatctgatgctgtttccctgcagacaatgcgagagaatgaatcagaattcaaatatctgcttcactcacggacagaaagactgtttagagtgctttcccgtgtcagaatctcaacccgtttctgtcgtcaaaaaggcgtatcagaaactgtgctacattcatcatatcatgggaaaggtgccagacgcttgcactgcctgcgatctggtcaatgtggatttggatgactgcatctttgaacaataaatgatttaaatcaggtatggctgccgatggttatcttccagattggctcgaggacaacctctctgagggcattcgcgagtggtgggcgctgaaaccaggagccccgaagcccaaagccaaccagcaaaagcaggacgacggccggggtctggtgcttccaggctacaagtacctcggacccttcaacggactcgacaagggggagcccgtgaacgcggcggacgcagcggccctcgagcacgacaaggcctacgaccagcagctgcaggcgggtgacaatccgtacctgaggtataaccacgccgacgccgagtttcaggagcgtctgcaagaagatacgtcttttgggggcaacctagggcgagcagtcttccaggccaagaagcgggttctcgaacctctcggtctggttgaggaaggcgctaagacggctcctggaaagaagagaccggtagagccatcaccccagcgttctccagactcctctacgggcatcggcaagaaaggccaacagcccgccagaaaaagactcaattttggtcagactggcgactcagagtcagttccagaccctcaacctctcggagaacctccagcagcgccctctggtgtgggacctaatacaatggctgcaggcggtggcgcaccaatggcagacaataacgaaggcgccgacggagtgggtagttcctcgggaaattggcattgcgattccacatggctgggcgacagagtcatcaccaccagcacccgaacctgggccctgcccacctacaacaaccacctctacaagcaaatctccaacgggacatcgggaggagccaccaacgacaacacctacttcggctacagcaccccctgggggtattttgactttaacagattccactgccacttttcaccacgtgactggcagcgactcatcaacaacaactggggattccggcccaagagactcagcttcaagctcttcaacatccaggtcaaggaggtcacgcagaatgaaggcaccaagaccatcgccaataacctcaccagcaccatccaggtgtttacggactcggagtaccagctgccgtacgttctcggctctgcccaccagggctgcctgcctccgttcccggcggacgtgttcatgattccccagtacggctacctaacactcaacaacggtagtcaggccgtgggacgctcctccttctactgcctggaatactttccttcgcagatgctgagaaccggcaacaacttccagtttacttacaccttcgaggacgtgcctttccacagcagctacgcccacagccagagcttggaccggctgatgaatcctctgattgaccagtacctgtactacttgtctcggactcaaacaacaggaggcacggcaaatacgcagactctgggcttcagccaaggtgggcctaatacaatggccaatcaggcaaagaactggctgccaggaccctgttaccgccaacaacgcgtctcaacgacaaccgggcaaaacaacaatagcaactttgcctggactgctgggaccaaataccatctgaatggaagaaattcattggctaatcctggcatcgctatggcaacacacaaagacgacgaggagcgtttttttcccagtaacgggatcctgatttttggcaaacaaaatgctgccagagacaatgcggattacagcgatgtcatgctcaccagcgaggaagaaatcaaaaccactaaccctgtggctacagaggaatacggtatcgtggcagataacttgcagcagcaaaacacggctcctcaaattggaactgtcaacagccagggggccttacccggtatggtctggcagaaccgggacgtgtacctgcagggtcccatctgggccaagattcctcacacggacggcaacttccacccgtctccgctgatgggcggctttggcctgaaacatcctccgcctcagatcctgatcaagaacacgcctgtacctgcggatcctccgaccaccttcaaccagtcaaagctgaactctttcatcacgcaatacagcaccggacaggtcagcgtggaaattgaatgggagctgcagaaggaaaacagcaagcgctggaaccccgagatccagtacacctccaactactacaaatctacaagtgtggactttgctgttaatacagaaggcgtgtactctgaaccccgccccattggcacccgttacctcacccgtaatctgtaa

SEQ ID NO: 258 - DNA, 9825 bp, synthetic construct
  source 1..9825: mol_type = other DNA
atgccggggttttacgagattgtgattaaggtccccagcgaccttgacgagcatctgcccggcatttctgacagctttgtgaactgggtggccgagaaggaatgggagttgccgccagattctgacatggatctgaatctgattgagcaggcacccctgaccgtggccgagaagctgcagcgcgactttctgacggaatggcgccgtgtgagtaaggccccggaggctcttttctttgtgcaatttgagaagggagagagctacttccacatgcacgtgctcgtggaaaccaccggggtgaaatccatggttttgggacgtttcctgagtcagattcgcgaaaaactgattcagagaatttaccgcgggatcgagccgactttgccaaactggttcgcggtcacaaagaccagaaatggcgccggaggcgggaacaaggtggtggatgagtgctacatccccaattacttgctccccaaaacccagcctgagctccagtgggcgtggactaatatggaacagtatttaagcgcctgtttgaatctcacggagcgtaaacggttggtggcgcagcatctgacgcacgtgtcgcagacgcaggagcagaacaaagagaatcagaatcccaattctgatgcgccggtgatcagatcaaaaacttcagccaggtacatggagctggtcgggtggctcgtggacaaggggattacctcggagaagcagtggatccaggaggaccaggcctcatacatctccttcaatgcggcctccaactcgcggtcccaaatcaaggctgccttggacaatgcgggaaagattatgagcctgactaaaaccgcccccgactacctggtgggccagcagcccgtggaggacatttccagcaatcggatttataaaattttggaactaaacgggtacgatccccaatatgcggcttccgtctttctgggatgggccacgaaaaagttcggcaagaggaacaccatctggctgtttgggcctgcaactaccgggaagaccaacatcgcggaggccatagcccacactgtgcccttctacgggtgcgtaaactggaccaatgagaactttcccttcaacgactgtgtcgacaagatggtgatctggtgggaggaggggaagatgaccgccaaggtcgtggagtcggccaaagccattctcggaggaagcaaggtgcgcgtggaccagaaatgcaagtcctcggcccagatagacccgactcccgtgatcgtcacctccaacaccaacatgtgcgccgtgattgacgggaactcaacgaccttcgaacaccagcagccgttgcaagaccggatgttcaaatttgaactcacccgccgtctggatcatgactttgggaaggtcaccaagcaggaagtcaaagactttttccggtgggcaaaggatcacgtggttgaggtggagcatgaattctacgtcaaaaagggtggagccaagaaaagacccgcccccagtgacgcagatataagtgagcccaaacgggtgcgcgagtcagttgcgcagccatcgacgtcagacgcggaagcttcgatcaactacgcagacaggtaccaaaacaaatgttctcgtcacgtgggcatgaatctgatgctgtttccctgcagacaatgcgagagaatgaatcagaattcaaatatctgcttcactcacggacagaaagactgtttagagtgctttcccgtgtcagaatctcaacccgtttctgtcgtcaaaaaggcgtatcagaaactgtgctacattcatcatatcatgggaaaggtgccagacgcttgcactgcctgcgatctggtcaatgtggatttggatgactgcatctttgaacaataaatgatttaaatcaggtatggctgccgatggttatcttccagattggctcgaggacaacctctctgagggcattcgcgagtggtgggcgctgaaaccaggagccccgaagcccaaagccaaccagcaaaagcaggacgacggccggggtctggtgcttccaggctacaagtacctcggacccttcaacggactcgacaagggggagcccgtgaacgcggcggacgcagcggccctcgagcacgacaaggcctacgaccagcagctgcaggcgggtgacaatccgtacctgaggtataaccacgccgacgccgagtttcaggagcgtctgcaagaagatacgtcttttgggggcaacctagggcgagcagtcttccaggccaagaagcgggttctcgaacctctcggtctggttgaggaaggcgctaagacggctcctggaaagaagagaccggtagagccatcaccccagcgttctccagactcctctacgggcatcggcaagaaaggccaacagcccgccagaaaaagactcaattttggtcagactggcgactcagagtcagttccagaccctcaacctctcggagaacctccagcagcgccctctggtgtgggacctaatacaatggctgcaggcggtggcgcaccaatggcagacaataacgaaggcgccgacggagtgggtagttcctcgggaaattggcattgcgattccacatggctgggcgacagagtcatcaccaccagcacccgaacctgggccctgcccacctacaacaaccacctctacaagcaaatctccaacgggacatcgggaggagccaccaacgacaacacctacttcggctacagcaccccctgggggtattttgactttaacagattccactgccacttttcaccacgtgactggcagcgactcatcaacaacaactggggattccggcccaagagactcagcttcaagctcttcaacatccaggtcaaggaggtcacgcagaatgaaggcaccaagaccatcgccaataacctcaccagcaccatccaggtgtttacggactcggagtaccagctgccgtacgttctcggctctgcccaccagggctgcctgcctccgttcccggcggacgtgttcatgattccccagtacggctacctaacactcaacaacggtagtcaggccgtgggacgctcctccttctactgcctggaatactttccttcgcagatgctgagaaccggcaacaacttccagtttacttacaccttcgaggacgtgcctttccacagcagctacgcccacagccagagcttggaccggctgatgaatcctctgattgaccagtacctgtactacttgtctcggactcaaacaacaggaggcacggcaaatacgcagactctgggcttcagccaaggtgggcctaatacaatggccaatcaggcaaagaactggctgccaggaccctgttaccgccaacaacgcgtctcaacgacaaccgggcaaaacaacaatagcaactttgcctggactgctgggaccaaataccatctgaatggaagaaattcattggctaatcctggcatcgctatggcaacacacaaagacgacgaggagcgtttttttcccagtaacgggatcctgatttttggcaaacaaaatgctgccagagacaatgcggattacagcgatgtcatgctcaccagcgaggaagaaatcaaaaccactaaccctgtggctacagaggaatacggtatcgtggcagataacttgcagcagcaaaacacggctcctcaaattggaactgtcaacagccagggggccttacccggtatggtctggcagaaccgggacgtgtacctgcagggtcccatctgggccaagattcctcacacggacggcaacttccacccgtctccgctgatgggcggctttggcctgaaacatcctccgcctcagatcctgatcaagaacacgcctgtacctgcggatcctccgaccaccttcaaccagtcaaagctgaactctttcatcacgcaatacagcaccggacaggtcagcgtggaaattgaatgggagctgcagaaggaaaacagcaagcgctggaaccccgagatccagtacacctccaactactacaaatctacaagtgtggactttgctgttaatacagaaggcgtgtactctgaaccccgccccattggcacccgttacctcacccgtaatctgtaattgcctgttaatcaataaaccggttgattcgtttcagttgaactttggtctctgcgaagggcgaattcgtttaaacctgcaggactagagccgaattctgcatcgcgatagggataacagggtaataaataatgtactagagacactttcaataaaggcaaatgcttttatttgtacactctcgggtgattatttacccccacccttgccgtctgcgccgttcagaagtcgaaggggttctgtctggcatcggaatgggccacgggcagagacacgttccggtactggtgcttggtggaccacttgaactcaggcacgaccattctaggcagctctgtgaagttctcgctccacaggctccgcaccatcaccagggcgttcagcaggtcaggggcgctgattttgaagtcgcagttaggtccgccgccctgggctctgctgtttctgtacacagggttgcagcactggaacacaataagagcagggtggtgcacgctggccagcacagacttgtcgctgatcaggtcggcgtcgagatcctcggcgttagacaaggcaaaaggggtcagcttgggcagctggcggcccaggaaaggggcgtggccgggcttgctattgcactcgcatctcagaggcatcagcaggtggccgtggccggtctgggcgttggggtacagggcctgcataaaggccttgatctgtttgaaggccacttgggccttggcgccttcggagaagaacatgccgcagcttttgccgctgaactggttggcggggcaggcggcgtcgtgcacacaacaccgggcgtcggtattgctgatctgcaccacgtttctgccccatctgttcttcacgatcttggccttgctgctctgctctttcagggccctctggccgttctcagaggtgacgtccatctcgatcacatgttccttgttgatcatgatgctgccgtgcagacacttcagctcgccctcgatttccgcgcatctgtgcagccacagggcacaaccggtaggctcgtggtgcttgtatgtcacctcagcaaaagattgcaggtaggcttgcaggaatctgcccatcatggtcacgaaggtcttgttggaggtaaaagtcagctgcagtcctctgtgttcctcgttcagccatgtcttgcacacggcggccagagcctcgacctgatctggcagcagcttgaaattagccttcaggtcgttgtccacgtgatacttatccatcagtgctctggcggcttccatgcccttctcccaggcggaaacgatgggcacgctcagggggttcatcacggtgatctcgctttcagcttctgaaggttcctcctcttcctcctgtgttctcatgccccgagccacggggtcgtcctcattcagtctccgcacggttctttttcctccctttccgtgcttaatcagtacaggaggattagagaagcccaccatctggagggcgacgtcctccctttcttcttcgctatccacgatcacttctgggctggggggccgttcaggctttgggctaggccgtttttttttcttcttaggggcgatagccagatcagcggcgcttgtagagggccgaggactaggggttctaggcacgagggcgtcctggctgctgtcctcctcatcctcgctctcgatccgtctccgcattctcttcttagggggggcccgcggagggggagggctagggctaggggacgacacatcttccatggttggaggtctgcgagcagcgcctctgcctctctctggtgttgtctcgcgctgttcttcctctctagaggccatttccttctcctataggcagaaaaagatcgttgaaactcactccggggctgtggacgtcggcttaccttcgcaaatttgtacctgaggactaccacgcccacgagattaggttctacgaagaccaatcccgcccgcctaatgcggagcttaccgcctgcgtcattacccagggccacattcttggccaattgcaagccatcaacaaagcccgccaagagtttctgctacgaaagggacggggggtttacttggacccccagtccggcgaggagctcaacccaatccccccgccgccgcagccctatcagcagcagccgcgggcccttgcttcccaggatggcacccaaaaagaagctgcagctgccgccgccacccacggacgaggaggaatactgggacagtcaggcagaggaggttttggacgaggaggaggaggacatgatggaagactgggagagcctagacgaggaagcttccgaggtcgaagaggtgtcagacgaaacaccgtcaccctcggtcgcattcccctcgccggcgccccagaaatcggcaaccggttccagcatggctacaacctccgctcctcaggcgccgccggcactgcccgttcgccgacccaaccgtagatgggacaccactggaaccagggccggtaagtccaagcagccgccgccgttagcccaagagcaacaacagcgccaaggctaccgctcatggcgcgggcacaagaacgccatagttgcttgcttgcaagactgtgggggcaacatctccttcgcccgccgctttcttctctaccatcacggcgtggccttcccccgtaacatcctgcattactaccgtcatctctacagcccatactgcaccggcggcagcggcagcaacagcagcggccacacagaagcaaaggcgaccggatagcaagactctgacaaagcccaagaaatccacagcggcggcagcagcaggaggaggagcgctgcgtctggcgcccaacgaacccgtatcgacccgcgagcttagaaacaggatttttcccactctgtatgctatatttcaacagagcaggggccaagaacaagagctgaaaataaaaaacaggtctctgcgatccctcacccgcagctgcctgtatcacaaaagcgaagatcagcttcggcgcacgctggaagacgcggaggctctcttcagtaaatactgcgcgctgactcttaaggactagtttcgcgccctttctcaaatttaagcgcgaaaactacgtcatctccagcggccacacccggcgccagcacctgttgtcagcgccattttttagggcggagtaacttgtatgtgttgggaattgtagttttcttaaaatgggaagtgacgtaacgtgggaaaacggaagtgacgatttgaggaagttgtgggttttttggctttcgtttctgggcgtaggttcgcgtgcggttttctgggtgttttttgtggactttaaccgttacgtcattttttagtcctatatatactcgctctgcacttggcccttttttacactgtgactgattgagctggtgccgtgtcgagtggtgtttttttaataggttttcttttttactggtaaggctgactgttatgactacgtccggcgttccatttggcatgacactacgaccaacacgatctcggttgtctcggcgcactccgtacagtagggatcgtctacctccttttgagacagaaacccgcgctaccatactggaggatcatccgctgctgcccgaatgtaacactttgacaatgcacaacgtgagttacgtgcgaggtcttccctgcagtgtgggatttacgctgattcaggaatgggttgttccctgggatatggttctaacgcgggaggagcttgtaatcctgaggaagtgtatgcacgtgtgcctgtgttgtgccaacattgatatcatgacgagcatgatgatccatggttacgagtcctgggctctccactgtcattgttccagtcccggttccctgcagtgtatagccggcgggcaggttttggccagctggtttaggatggtggtggatggcgccatgtttaatcagaggtttatatggtaccgggaggtggtgaattacaacatgccaaaagaggtaatgtttatgtccagcgtgtttatgaggggtcgccacttaatctacctgcgcttgtggtatgatggccacgtgggttctgtggtccccgccatgagctttggatacagcgccttgcactgtgggattttgaacaatattgtggtgctgtgctgcagttactgtgctgatttaagtgagatcagggtgcgctgctgtgcccggaggacaaggcgccttatgctgcgggcggtgcgaatcatcgctgaggagaccactgccatgttgtattcctgcaggacggagcggcggcggcagcagtttattcgcgcgctgctgcagcaccaccgccctatcctgatgcacgattatgactctacccccatgtaggcgtggacttctccttcgccgcccgttaagcaaccgcaagttggacagcagcctgtggctcagcagctggacagcgacatgaacttaagtgagctgcccggggagtttattaatatcactgatgagcgtttggctcgacaggaaaccgtgtggaatataacacctaagaatatgtctgttacccatgatatgatgctttttaaggccagccggggagaaaggactgtgtactctgtgtgttgggagggaggtggcaggttgaatactagggttctgtgagtttgattaaggtacggtgatctgtataagctatgtggtggtggggctatactactgaatgaaaaatgacttgaaattttctgcaattgaaaaataaacacgttgaaacataacacaaacgattctttattcttgggcaatgtatgaaaaagtgtaagaggatgtggcaaatatttcattaatgtagttgtggccagaccagtcccatgaaaatgacatagagtatgcacttggagttgtgtctcctgtttcctgtgtaccgtttagtgtaatggttagtgttacaggtttagttttgtctccgtttaagtaaacttgactgacaatgttacttttggcagttttaccgtgagattttggataagctgataggttaggcataaatccaacagcgtttgtataggctgtcgcccctcctgacgcggtaggaggaggggagggtgccctgcatgtctgccgctgctcttgctcttgccgctgctgaggaggggggcgcatctgccgcagcaccggatgcatctgggaaaagcaaaaaaggggctcgtccctgtttccggaggaatttgcaagcggggtcttgcatgacggggaggcaaacccccgttcgccgcagtccggccggtccgagactcgaaccgggggtcccgcgactcaacccttggaaaataaccctccggctacagggagcgagccacttaatgctttcgctttccagcctaaccgcttacgctgcgcgcggccagtggccaaaaaagctagcgcagcagccgccgcgcctggaaggaagccaaaaggagcactcccccgttgtctgacgtcgcacacctgggttcgacacgcgggcggtaaccgcatggatcacggcggacggccggatacggggctcgaaccccggtcgtccgccatgatacccttgcgaatttatccaccagaccacggaagagtgcccgcttacaggctctccttttgcacggtctagagcgtcaacgattgcgcgcgcctgaccggccagagcgtcccgaccatggagcactttttgccgctgcgcaacatctggaaccgcgtccgcgactttccgcgcgcctccaccaccgccgccggcatcacctggatgtccaggtacatctacggata

SEQ ID NO: 259 - DNA, 12588 bp, synthetic construct
  source 1..12588: mol_type = other DNA
tcgcgcgtttcggtgatgacggtgaaaacctctgacacatgcagctcccggagacggtcacagcttgtctgtaagcggatgccgggagcagacaagcccgtcagggcgcgtcagcgggtgttggcgggtgtcggggctggcttaactatgcggcatcagagcagattgtactgagagtgcaccatatgcggtgtgaaataccgcacagatgcgtaaggagaaaataccgcatcaggcgccattcgccattcaggctgcgcaactgttgggaagggcgatcggtgcgggcctcttcgctattacgccagctggcgaaagggggatgtgctgcaaggcgattaagttgggtaacgccagggttttcccagtcacgacgttgtaaaacgacggccagagaattccgcagggtctccattttgaagcgggaggtttgaacgcgcagccgccatgccggggttttacgagattgtgattaaggtccccagcgaccttgacgagcatctgcccggcatttctgacagctttgtgaactgggtggccgagaaggaatgggagttgccgccagattctgacatggatctgaatctgattgagcaggcacccctgaccgtggccgagaagctgcagcgcgactttctgacggaatggcgccgtgtgagtaaggccccggaggctcttttctttgtgcaatttgagaagggagagagctacttccacatgcacgtgctcgtggaaaccaccggggtgaaatccatggttttgggacgtttcctgagtcagattcgcgaaaaactgattcagagaatttaccgcgggatcgagccgactttgccaaactggttcgcggtcacaaagaccagaaatggcgccggaggcgggaacaaggtggtggatgagtgctacatccccaattacttgctccccaaaacccagcctgagctccagtgggcgtggactaatatggaacagtatttaagcgcctgtttgaatctcacggagcgtaaacggttggtggcgcagcatctgacgcacgtgtcgcagacgcaggagcagaacaaagagaatcagaatcccaattctgatgcgccggtgatcagatcaaaaacttcagccaggtacatggagctggtcgggtggctcgtggacaaggggattacctcggagaagcagtggatccaggaggaccaggcctcatacatctccttcaatgcggcctccaactcgcggtcccaaatcaaggctgccttggacaatgcgggaaagattatgagcctgactaaaaccgcccccgactacctggtgggccagcagcccgtggaggacatttccagcaatcggatttataaaattttggaactaaacgggtacgatccccaatatgcggcttccgtctttctgggatgggccacgaaaaagttcggcaagaggaacaccatctggctgtttgggcctgcaactaccgggaagaccaacatcgcggaggccatagcccacactgtgcccttctacgggtgcgtaaactggaccaatgagaactttcccttcaacgactgtgtcgacaagatggtgatctggtgggaggaggggaagatgaccgccaaggtcgtggagtcggccaaagccattctcggaggaagcaaggtgcgcgtggaccagaaatgcaagtcctcggcccagatagacccgactcccgtgatcgtcacctccaacaccaacatgtgcgccgtgattgacgggaactcaacgaccttcgaacaccagcagccgttgcaagaccggatgttcaaatttgaactcacccgccgtctggatcatgactttgggaaggtcaccaagcaggaagtcaaagactttttccggtgggcaaaggatcacgtggttgaggtggagcatgaattctacgtcaaaaagggtggagccaagaaaagacccgcccccagtgacgcagatataagtgagcccaaacgggtgcgcgagtcagttgcgcagccatcgacgtcagacgcggaagcttcgatcaactacgcagacaggtaccaaaacaaatgttctcgtcacgtgggcatgaatctgatgctgtttccctgcagacaatgcgagagaatgaatcagaattcaaatatctgcttcactcacggacagaaagactgtttagagtgctttcccgtgtcagaatctcaacccgtttctgtcgtcaaaaaggcgtatcagaaactgtgctacattcatcatatcatgggaaaggtgccagacgcttgcactgcctgcgatctggtcaatgtggatttggatgactgcatctttgaacaataaatgatttaaatcaggtatggctgccgatggttatcttccagattggctcgaggacaacctctctgagggcattcgcgagtggtgggcgctgaaaccaggagccccgaagcccaaagccaaccagcaaaagcaggacgacggccggggtctggtgcttccaggctacaagtacctcggacccttcaacggactcgacaagggggagcccgtgaacgcggcggacgcagcggccctcgagcacgacaaggcctacgaccagcagctgcaggcgggtgacaatccgtacctgaggtataaccacgccgacgccgagtttcaggagcgtctgcaagaagatacgtcttttgggggcaacctagggcgagcagtcttccaggccaagaagcgggttctcgaacctctcggtctggttgaggaaggcgctaagacggctcctggaaagaagagaccggtagagccatcaccccagcgttctccagactcctctacgggcatcggcaagaaaggccaacagcccgccagaaaaagactcaattttggtcagactggcgactcagagtcagttccagaccctcaacctctcggagaacctccagcagcgccctctggtgtgggacctaatacaatggctgcaggcggtggcgcaccaatggcagacaataacgaaggcgccgacggagtgggtagttcctcgggaaattggcattgcgattccacatggctgggcgacagagtcatcaccaccagcacccgaacctgggccctgcccacctacaacaaccacctctacaagcaaatctccaacgggacatcgggaggagccaccaacgacaacacctacttcggctacagcaccccctgggggtattttgactttaacagattccactgccacttttcaccacgtgactggcagcgactcatcaacaacaactggggattccggcccaagagactcagcttcaagctcttcaacatccaggtcaaggaggtcacgcagaatgaaggcaccaagaccatcgccaataacctcaccagcaccatccaggtgtttacggactcggagtaccagctgccgtacgttctcggctctgcccaccagggctgcctgcctccgttcccggcggacgtgttcatgattccccagtacggctacctaacactcaacaacggtagtcaggccgtgggacgctcctccttctactgcctggaatactttccttcgcagatgctgagaaccggcaacaacttccagtttacttacaccttcgaggacgtgcctttccacagcagctacgcccacagccagagcttggaccggctgatgaatcctctgattgaccagtacctgtactacttgtctcggactcaaacaacaggaggcacggcaaatacgcagactctgggcttcagccaaggtgggcctaatacaatggccaatcaggcaaagaactggctgccaggaccctgttaccgccaacaacgcgtctcaacgacaaccgggcaaaacaacaatagcaactttgcctggactgctgggaccaaataccatctgaatggaagaaattcattggctaatcctggcatcgctatggcaacacacaaagacgacgaggagcgtttttttcccagtaacgggatcctgatttttggcaaacaaaatgctgccagagacaatgcggattacagcgatgtcatgctcaccagcgaggaagaaatcaaaaccactaaccctgtggctacagaggaatacggtatcgtggcagataacttgcagcagcaaaacacggctcctcaaattggaactgtcaacagccagggggccttacccggtatggtctggcagaaccgggacgtgtacctgcagggtcccatctgggccaagattcctcacacggacggcaacttccacccgtctccgctgatgggcggctttggcctgaaacatcctccgcctcagatcctgatcaagaacacgcctgtacctgcggatcctccgaccaccttcaaccagtcaaagctgaactctttcatcacgcaatacagcaccggacaggtcagcgtggaaattgaatgggagctgcagaaggaaaacagcaagcgctggaaccccgagatccagtacacctccaactactacaaatctacaagtgtggactttgctgttaatacagaaggcgtgtactctgaaccccgccccattggcacccgttacctcacccgtaatctgtaattgcctgttaatcaataaaccggttgattcgtttcagttgaactttggtctctgcgaagggcgaattcgtttaaacctgcaggactagagccgaattctgcatcgcgatagggataacagggtaataaataatgtactagagacactttcaataaaggcaaatgcttttatttgtacactctcgggtgattatttacccccacccttgccgtctgcgccgttcagaagtcgaaggggttctgtctggcatcggaatgggccacgggcagagacacgttccggtactggtgcttggtggaccacttgaactcaggcacgaccattctaggcagctctgtgaagttctcgctccacaggctccgcaccatcaccagggcgttcagcaggtcaggggcgctgattttgaagtcgcagttaggtccgccgccctgggctctgctgtttctgtacacagggttgcagcactggaacacaataagagcagggtggtgcacgctggccagcacagacttgtcgctgatcaggtcggcgtcgagatcctcggcgttagacaaggcaaaaggggtcagcttgggcagctggcggcccaggaaaggggcgtggccgggcttgctattgcactcgcatctcagaggcatcagcaggtggccgtggccggtctgggcgttggggtacagggcctgcataaaggccttgatctgtttgaaggccacttgggccttggcgccttcggagaagaacatgccgcagcttttgccgctgaactggttggcggggcaggcggcgtcgtgcacacaacaccgggcgtcggtattgctgatctgcaccacgtttctgccccatctgttcttcacgatcttggccttgctgctctgctctttcagggccctctggccgttctcagaggtgacgtccatctcgatcacatgttccttgttgatcatgatgctgccgtgcagacacttcagctcgccctcgatttccgcgcatctgtgcagccacagggcacaaccggtaggctcgtggtgcttgtatgtcacctcagcaaaagattgcaggtaggcttgcaggaatctgcccatcatggtcacgaaggtcttgttggaggtaaaagtcagctgcagtcctctgtgttcctcgttcagccatgtcttgcacacggcggccagagcctcgacctgatctggcagcagcttgaaattagccttcaggtcgttgtccacgtgatacttatccatcagtgctctggcggcttccatgcccttctcccaggcggaaacgatgggcacgctcagggggttcatcacggtgatctcgctttcagcttctgaaggttcctcctcttcctcctgtgttctcatgccccgagccacggggtcgtcctcattcagtctccgcacggttctttttcctccctttccgtgcttaatcagtacaggaggattagagaagcccaccatctggagggcgacgtcctccctttcttcttcgctatccacgatcacttctgggctggggggccgttcaggctttgggctaggccgtttttttttcttcttaggggcgatagccagatcagcggcgcttgtagagggccgaggactaggggttctaggcacgagggcgtcctggctgctgtcctcctcatcctcgctctcgatccgtctccgcattctcttcttagggggggcccgcggagggggagggctagggctaggggacgacacatcttccatggttggaggtctgcgagcagcgcctctgcctctctctggtgttgtctcgcgctgttcttcctctctagaggccatttccttctcctataggcagaaaaagatcgttgaaactcactccggggctgtggacgtcggcttaccttcgcaaatttgtacctgaggactaccacgcccacgagattaggttctacgaagaccaatcccgcccgcctaatgcggagcttaccgcctgcgtcattacccagggccacattcttggccaattgcaagccatcaacaaagcccgccaagagtttctgctacgaaagggacggggggtttacttggacccccagtccggcgaggagctcaacccaatccccccgccgccgcagccctatcagcagcagccgcgggcccttgcttcccaggatggcacccaaaaagaagctgcagctgccgccgccacccacggacgaggaggaatactgggacagtcaggcagaggaggttttggacgaggaggaggaggacatgatggaagactgggagagcctagacgaggaagcttccgaggtcgaagaggtgtcagacgaaacaccgtcaccctcggtcgcattcccctcgccggcgccccagaaatcggcaaccggttccagcatggctacaacctccgctcctcaggcgccgccggcactgcccgttcgccgacccaaccgtagatgggacaccactggaaccagggccggtaagtccaagcagccgccgccgttagcccaagagcaacaacagcgccaaggctaccgctcatggcgcgggcacaagaacgccatagttgcttgcttgcaagactgtgggggcaacatctccttcgcccgccgctttcttctctaccatcacggcgtggccttcccccgtaacatcctgcattactaccgtcatctctacagcccatactgcaccggcggcagcggcagcaacagcagcggccacacagaagcaaaggcgaccggatagcaagactctgacaaagcccaagaaatccacagcggcggcagcagcaggaggaggagcgctgcgtctggcgcccaacgaacccgtatcgacccgcgagcttagaaacaggatttttcccactctgtatgctatatttcaacagagcaggggccaagaacaagagctgaaaataaaaaacaggtctctgcgatccctcacccgcagctgcctgtatcacaaaagcgaagatcagcttcggcgcacgctggaagacgcggaggctctcttcagtaaatactgcgcgctgactcttaaggactagtttcgcgccctttctcaaatttaagcgcgaaaactacgtcatctccagcggccacacccggcgccagcacctgttgtcagcgccattttttagggcggagtaacttgtatgtgttgggaattgtagttttcttaaaatgggaagtgacgtaacgtgggaaaacggaagtgacgatttgaggaagttgtgggttttttggctttcgtttctgggcgtaggttcgcgtgcggttttctgggtgttttttgtggactttaaccgttacgtcattttttagtcctatatatactcgctctgcacttggcccttttttacactgtgactgattgagctggtgccgtgtcgagtggtgtttttttaataggttttcttttttactggtaaggctgactgttatgactacgtccggcgttccatttggcatgacactacgaccaacacgatctcggttgtctcggcgcactccgtacagtagggatcgtctacctccttttgagacagaaacccgcgctaccatactggaggatcatccgctgctgcccgaatgtaacactttgacaatgcacaacgtgagttacgtgcgaggtcttccctgcagtgtgggatttacgctgattcaggaatgggttgttccctgggatatggttctaacgcgggaggagcttgtaatcctgaggaagtgtatgcacgtgtgcctgtgttgtgccaacattgatatcatgacgagcatgatgatccatggttacgagtcctgggctctccactgtcattgttccagtcccggttccctgcagtgtatagccggcgggcaggttttggccagctggtttaggatggtggtggatggcgccatgtttaatcagaggtttatatggtaccgggaggtggtgaattacaacatgccaaaagaggtaatgtttatgtccagcgtgtttatgaggggtcgccacttaatctacctgcgcttgtggtatgatggccacgtgggttctgtggtccccgccatgagctttggatacagcgccttgcactgtgggattttgaacaatattgtggtgctgtgctgcagttactgtgctgatttaagtgagatcagggtgcgctgctgtgcccggaggacaaggcgccttatgctgcgggcggtgcgaatcatcgctgaggagaccactgccatgttgtattcctgcaggacggagcggcggcggcagcagtttattcgcgcgctgctgcagcaccaccgccctatcctgatgcacgattatgactctacccccatgtaggcgtggacttctccttcgccgcccgttaagcaaccgcaagttggacagcagcctgtggctcagcagctggacagcgacatgaacttaagtgagctgcccggggagtttattaatatcactgatgagcgtttggctcgacaggaaaccgtgtggaatataacacctaagaatatgtctgttacccatgatatgatgctttttaaggccagccggggagaaaggactgtgtactctgtgtgttgggagggaggtggcaggttgaatactagggttctgtgagtttgattaaggtacggtgatctgtataagctatgtggtggtggggctatactactgaatgaaaaatgacttgaaattttctgcaattgaaaaataaacacgttgaaacataacacaaacgattctttattcttgggcaatgtatgaaaaagtgtaagaggatgtggcaaatatttcattaatgtagttgtggccagaccagtcccatgaaaatgacatagagtatgcacttggagttgtgtctcctgtttcctgtgtaccgtttagtgtaatggttagtgttacaggtttagttttgtctccgtttaagtaaacttgactgacaatgttacttttggcagttttaccgtgagattttggataagctgataggttaggcataaatccaacagcgtttgtataggctgtcgcccctcctgacgcggtaggaggaggggagggtgccctgcatgtctgccgctgctcttgctcttgccgctgctgaggaggggggcgcatctgccgcagcaccggatgcatctgggaaaagcaaaaaaggggctcgtccctgtttccggaggaatttgcaagcggggtcttgcatgacggggaggcaaacccccgttcgccgcagtccggccggtccgagactcgaaccgggggtcccgcgactcaacccttggaaaataaccctccggctacagggagcgagccacttaatgctttcgctttccagcctaaccgcttacgctgcgcgcggccagtggccaaaaaagctagcgcagcagccgccgcgcctggaaggaagccaaaaggagcactcccccgttgtctgacgtcgcacacctgggttcgacacgcgggcggtaaccgcatggatcacggcggacggccggatacggggctcgaaccccggtcgtccgccatgatacccttgcgaatttatccaccagaccacggaagagtgcccgcttacaggctctccttttgcacggtctagagcgtcaacgattgcgcgcgcctgaccggccagagcgtcccgaccatggagcactttttgccgctgcgcaacatctggaaccgcgtccgcgactttccgcgcgcctccaccaccgccgccggcatcacctggatgtccaggtacatctacggatatggcaaacagctattatgggtattatgggtgcggccgcggatcccgggcccgtcgactgcagaggcctgcatgcaagcttggtgtaatcatggtcatagctgtttcctgtgtgaaattgttatccgctcacaattccacacaacatacgagccggaagcataaagtgtaaagcctggggtgcctaatgagtgagctaactcacattaattgcgttgcgctcactgcccgctttccagtcgggaaacctgtcgtgccagctgcattaatgaatcggccaacgcgcggggagaggcggtttgcgtattgggcgctcttccgcttcctcgctcactgactcgctgcgctcggtcgttcggctgcggcgagcggtatcagctcactcaaaggcggtaatacggttatccacagaatcaggggataacgcaggaaagaacatgtgagcaaaaggccagcaaaaggccaggaaccgtaaaaaggccgcgttgctggcgtttttccataggctccgcccccctgacgagcatcacaaaaatcgacgctcaagtcagaggtggcgaaacccgacaggactataaagataccaggcgtttccccctggaagctccctcgtgcgctctcctgttccgaccctgccgcttaccggatacctgtccgcctttctcccttcgggaagcgtggcgctttctcatagctcacgctgtaggtatctcagttcggtgtaggtcgttcgctccaagctgggctgtgtgcacgaaccccccgttcagcccgaccgctgcgccttatccggtaactatcgtcttgagtccaacccggtaagacacgacttatcgccactggcagcagccactggtaacaggattagcagagcgaggtatgtaggcggtgctacagagttcttgaagtggtggcctaactacggctacactagaagaacagtatttggtatctgcgctctgctgaagccagttaccttcggaaaaagagttggtagctcttgatccggcaaacaaaccaccgctggtagcggtggtttttttgtttgcaagcagcagattacgcgcagaaaaaaaggatctcaagaagatcctttgatcttttctacggggtctgacgctcagtggaacgaaaactcacgttaagggattttggtcatgagattatcaaaaaggatcttcacctagaaggtcctgtattagaggtcacgtgagtgttttgcgacattttgcgacaccatgtggtcacgctgggtatttaagcccgagtgagcacgcagggtctccattttgaagcgggaggtttgaacgcgcagccgccatccttttaaattaaaaatgaagttttaaatcaagcccaatctgaataatgttacaaccaattaaccaattctgattagaaaaactcatcgagcatcaaatgaaactgcaatttattcatatcaggattatcaataccatatttttgaaaaagccgtttctgtaatgaaggagaaaactcaccgaggcagttccataggatggcaagatcctggtatcggtctgcgattccgactcgtccaacatcaatacaacctattaatttcccctcgtcaaaaataaggttatcaagtgagaaatcaccatgagtgacgactgaatccggtgagaatggcaaaagtttatgcatttctttccagacttgttcaacaggccagccattacgctcgtcatcaaaatcactcgcatcaaccaaaccgttattcattcgtgattgcgcctgagcgagacgaaatacgcgatcgctgttaaaaggacaattacaaacaggaatcgaatgcaaccggcgcaggaacactgccagcgcatcaacaatattttcacctgaatcaggatattcttctaatacctggaatgctgtttttccggggatcgcagtggtgagtaaccatgcatcatcaggagtacggataaaatgcttgatggtcggaagaggcataaattccgtcagccagtttagtctgaccatctcatctgtaacatcattggcaacgctacctttgccatgtttcagaaacaactctggcgcatcgggcttcccatacaagcgatagattgtcgcacctgattgcccgacattatcgcgagcccatttatacccatataaatcagcatccatgttggaatttaatcgcggcctcgacgtttcccgttgaatatggctcataacaccccttgtattactgtttatgtaagcagacagttttattgttcatgatgatatatttttatcttgtgcaatgtaacatcagagattttgagacacgggccagagctgca

SEQ ID NO: 260 - DNA, 5505 bp, synthetic construct; identical to SEQ ID NO: 106
  source 1..5505: mol_type = other DNA

SEQ ID NO: 261 - DNA, 2208 bp, synthetic construct
  source 1..2208: mol_type = other DNA
atggctgccgatggttatcttccagattggctcgaggacaaccttagtgaaggaattcgcgagtggtgggctttgaaaccaggagcccctcaacccaaggcaaatcaacaacatcaagacaacgctcgaggtcttgtgcttccgggttacaaataccttggacccggcaacggactcgacaagggggagccggtgaacgcagcagacgcggcggccctcgagcacgacaaggcctacgaccagcagctgaaggccggagacaacccgtacctcaagtacaaccacgccgacgccgagttccaggagcggctgaaagaagatacgtcttttgggggcaacctcgggcgagcagtcttccaggccaaaaagaggcttctagaacctcttggtctggttgaggaagcggctaagacggctcctggaaagaagaggcctgtagagcagtctcctcaggaaccggactcctccgcgggtattggcaaatcgggtgcacagcccgctaaaaagagactcaatttcggtcagactggcgacacagagtcagtcccagaccctcaaccaatcggagaacctcccgcagccccctcaggtgtgggatctcttacaatggcttcaggtggtggcgcaccagtggcagacaataacgaaggtgccgatggagtgggtagttcctcgggaaattggcattgcgattcccaatggctgggggacagagtcatcaccaccagcacccgaacctgggccctgcccacctacaacaatcacctctacaagcaaatctccaacagcacatctggaggatcttcaaatgacaacgcctacttcggctacagcaccccctgggggtattttgacttcaacagattccactgccacttctcaccacgtgactggcagcgactcatcaacaacaactggggattccggcctaagcgactcaacttcaagctcttcaacattcaggtcaaagaggttacggacaacaatggagtcaagaccatcgccaataaccttaccagcacggtccaggtcttcacggactcagactatcagctcccgtacgtgctcgggtcggctcacgagggctgcctcccgccgttcccagcggacgttttcatgattcctcagtacgggtatctgacgcttaatgatggaagccaggccgtgggtcgttcgtccttttactgcctggaatatttcccgtcgcaaatgctaagaacgggtaacaacttccagttcagctacgagtttgagaacgtacctttccatagcagctacgctcacagccaaagcctggaccgactaatgaatccactcatcgaccaatacttgtactatctctcaaagactattaacggttctggacagaatcaacaaacgctaaaattcagtgtggccggacccagcaacatggctgtccagggaagaaactacatacctggacccagctaccgacaacaacgtgtctcaaccactgtgactcaaaacaacaacagcgaatttgcttggcctggagcttcttcttgggctctcaatggacgtaatagcttgatgaatcctggacctgctatggccagccacaaagaaggagaggaccgtttctttcctttgtctggatctttaatttttggcaaacaaggaactggaagagacaacgtggatgcggacaaagtcatgataaccaacgaagaagaaattaaaactactaacccggtagcaacggagtcctatggacaagtggccacaaaccaccagagtgcccaagcacaggcgcagaccggctgggttcaaaaccaaggaatacttccgggtatggtttggcaggacagagatgtgtacctgcaaggacccatttgggccaaaattcctcacacggacggcaactttcacccttctccgctgatgggagggtttggaatgaagcacccgcctcctcagatcctcatcaaaaacacacctgtacctgcggatcctccaacggccttcaacaaggacaagctgaactctttcatcacccagtattctactggccaagtcagcgtggagatcgagtgggagctgcagaaggaaaacagcaagcgctggaacccggagatccagtacacttccaactattacaagtctaataatgttgaatttgctgttaatactgaaggtgtatatagtgaaccccgccccattggcaccagatacctgactcgtaatctg

SEQ ID NO: 262 - DNA, 4090 bp, synthetic construct
  source 1..4090: mol_type = other DNA
atgccggggttttacgagattgtgattaaggtccccagcgaccttgacgagcatctgcccggcatttctgacagctttgtgaactgggtggccgagaaggaatgggagttgccgccagattctgacatggatctgaatctgattgagcaggcacccctgaccgtggccgagaagctgcagcgcgactttctgacggaatggcgccgtgtgagtaaggccccggaggctcttttctttgtgcaatttgagaagggagagagctacttccacatgcacgtgctcgtggaaaccaccggggtgaaatccatggttttgggacgtttcctgagtcagattcgcgaaaaactgattcagagaatttaccgcgggatcgagccgactttgccaaactggttcgcggtcacaaagaccagaaatggcgccggaggcgggaacaaggtggtggatgagtgctacatccccaattacttgctccccaaaacccagcctgagctccagtgggcgtggactaatatggaacagtatttaagcgcctgtttgaatctcacggagcgtaaacggttggtggcgcagcatctgacgcacgtgtcgcagacgcaggagcagaacaaagagaatcagaatcccaattctgatgcgccggtgatcagatcaaaaacttcagccaggtacatggagctggtcgggtggctcgtggacaaggggattacctcggagaagcagtggatccaggaggaccaggcctcatacatctccttcaatgcggcctccaactcgcggtcccaaatcaaggctgccttggacaatgcgggaaagattatgagcctgactaaaaccgcccccgactacctggtgggccagcagcccgtggaggacatttccagcaatcggatttataaaattttggaactaaacgggtacgatccccaatatgcggcttccgtctttctgggatgggccacgaaaaagttcggcaagaggaacaccatctggctgtttgggcctgcaactaccgggaagaccaacatcgcggaggccatagcccacactgtgcccttctacgggtgcgtaaactggaccaatgagaactttcccttcaacgactgtgtcgacaagatggtgatctggtgggaggaggggaagatgaccgccaaggtcgtggagtcggccaaagccattctcggaggaagcaaggtgcgcgtggaccagaaatgcaagtcctcggcccagatagacccgactcccgtgatcgtcacctccaacaccaacatgtgcgccgtgattgacgggaactcaacgaccttcgaacaccagcagccgttgcaagaccggatgttcaaatttgaactcacccgccgtctggatcatgactttgggaaggtcaccaagcaggaagtcaaagactttttccggtgggcaaaggatcacgtggttgaggtggagcatgaattctacgtcaaaaagggtggagccaagaaaagacccgcccccagtgacgcagatataagtgagcccaaacgggtgcgcgagtcagttgcgcagccatcgacgtcagacgcggaagcttcgatcaactacgcagacaggtaccaaaacaaatgttctcgtcacgtgggcatgaatctgatgctgtttccctgcagacaatgcgagagaatgaatcagaattcaaatatctgcttcactcacggacagaaagactgtttagagtgctttcccgtgtcagaatctcaacccgtttctgtcgtcaaaaaggcgtatcagaaactgtgctacattcatcatatcatgggaaaggtgccagacgcttgcactgcctgcgatctggtcaatgtggatttggatgactgcatctttgaacaataaatgatttaaatcaggtatggctgccgatggttatcttccagattggctcgaggacaaccttagtgaaggaattcgcgagtggtgggctttgaaaccaggagcccctcaacccaaggcaaatcaacaacatcaagacaacgctcgaggtcttgtgcttccgggttacaaataccttggacccggcaacggactcgacaagggggagccggtgaacgcagcagacgcggcggccctcgagcacgacaaggcctacgaccagcagctgaaggccggagacaacccgtacctcaagtacaaccacgccgacgccgagttccaggagcggctgaaagaagatacgtcttttgggggcaacctcgggcgagcagtcttccaggccaaaaagaggcttctagaacctcttggtctggttgaggaagcggctaagacggctcctggaaagaagaggcctgtagagcagtctcctcaggaaccggactcctccgcgggtattggcaaatcgggtgcacagcccgctaaaaagagactcaatttcggtcagactggcgacacagagtcagtcccagaccctcaaccaatcggagaacctcccgcagccccctcaggtgtgggatctcttacaatggcttcaggtggtggcgcaccagtggcagacaataacgaaggtgccgatggagtgggtagttcctcgggaaattggcattgcgattcccaatggctgggggacagagtcatcaccaccagcacccgaacctgggccctgcccacctacaacaatcacctctacaagcaaatctccaacagcacatctggaggatcttcaaatgacaacgcctacttcggctacagcaccccctgggggtattttgacttcaacagattccactgccacttctcaccacgtgactggcagcgactcatcaacaacaactggggattccggcctaagcgactcaacttcaagctcttcaacattcaggtcaaagaggttacggacaacaatggagtcaagaccatcgccaataaccttaccagcacggtccaggtcttcacggactcagactatcagctcccgtacgtgctcgggtcggctcacgagggctgcctcccgccgttcccagcggacgttttcatgattcctcagtacgggtatctgacgcttaatgatggaagccaggccgtgggtcgttcgtccttttactgcctggaatatttcccgtcgcaaatgctaagaacgggtaacaacttccagttcagctacgagtttgagaacgtacctttccatagcagctacgctcacagccaaagcctggaccgactaatgaatccactcatcgaccaatacttgtactatctctcaaagactattaacggttctggacagaatcaacaaacgctaaaattcagtgtggccggacccagcaacatggctgtccagggaagaaactacatacctggacccagctaccgacaacaacgtgtctcaaccactgtgactcaaaacaacaacagcgaatttgcttggcctggagcttcttcttgggctctcaatggacgtaatagcttgatgaatcctggacctgctatggccagccacaaagaaggagaggaccgtttctttcctttgtctggatctttaatttttggcaaacaaggaactggaagagacaacgtggatgcggacaaagtcatgataaccaacgaagaagaaattaaaactactaacccggtagcaacggagtcctatggacaagtggccacaaaccaccagagtgcccaagcacaggcgcagaccggctgggttcaaaaccaaggaatacttccgggtatggtttggcaggacagagatgtgtacctgcaaggacccatttgggccaaaattcctcacacggacggcaactttcacccttctccgctgatgggagggtttggaatgaagcacccgcctcctcagatcctcatcaaaaacacacctgtacctgcggatcctccaacggccttcaacaaggacaagctgaactctttcatcacccagtattctactggccaagtcagcgtggagatcgagtgggagctgcagaaggaaaacagcaagcgctggaacccggagatccagtacacttccaactattacaagtctaataatgttgaatttgctgttaatactgaaggtgtatatagtgaaccccgccccattggcaccagatacctgactcgtaatctg

SEQ ID NO: 263 - DNA, 9819 bp, synthetic construct
  source 1..9819: mol_type = other DNA
atgccggggttttacgagattgtgattaaggtccccagcgaccttgacgagcatctgcccggcatttctgacagctttgtgaactgggtggccgagaaggaatgggagttgccgccagattctgacatggatctgaatctgattgagcaggcacccctgaccgtggccgagaagctgcagcgcgactttctgacggaatggcgccgtgtgagtaaggccccggaggctcttttctttgtgcaatttgagaagggagagagctacttccacatgcacgtgctcgtggaaaccaccggggtgaaatccatggttttgggacgtttcctgagtcagattcgcgaaaaactgattcagagaatttaccgcgggatcgagccgactttgccaaactggttcgcggtcacaaagaccagaaatggcgccggaggcgggaacaaggtggtggatgagtgctacatccccaattacttgctccccaaaacccagcctgagctccagtgggcgtggactaatatggaacagtatttaagcgcctgtttgaatctcacggagcgtaaacggttggtggcgcagcatctgacgcacgtgtcgcagacgcaggagcagaacaaagagaatcagaatcccaattctgatgcgccggtgatcagatcaaaaacttcagccaggtacatggagctggtcgggtggctcgtggacaaggggattacctcggagaagcagtggatccaggaggaccaggcctcatacatctccttcaatgcggcctccaactcgcggtcccaaatcaaggctgccttggacaatgcgggaaagattatgagcctgactaaaaccgcccccgactacctggtgggccagcagcccgtggaggacatttccagcaatcggatttataaaattttggaactaaacgggtacgatccccaatatgcggcttccgtctttctgggatgggccacgaaaaagttcggcaagaggaacaccatctggctgtttgggcctgcaactaccgggaagaccaacatcgcggaggccatagcccacactgtgcccttctacgggtgcgtaaactggaccaatgagaactttcccttcaacgactgtgtcgacaagatggtgatctggtgggaggaggggaagatgaccgccaaggtcgtggagtcggccaaagccattctcggaggaagcaaggtgcgcgtggaccagaaatgcaagtcctcggcccagatagacccgactcccgtgatcgtcacctccaacaccaacatgtgcgccgtgattgacgggaactcaacgaccttcgaacaccagcagccgttgcaagaccggatgttcaaatttgaactcacccgccgtctggatcatgactttgggaaggtcaccaagcaggaagtcaaagactttttccggtgggcaaaggatcacgtggttgaggtggagcatgaattctacgtcaaaaagggtggagccaagaaaagacccgcccccagtgacgcagatataagtgagcccaaacgggtgcgcgagtcagttgcgcagccatcgacgtcagacgcggaagcttcgatcaactacgcagacaggtaccaaaacaaatgttctcgtcacgtgggcatgaatctgatgctgtttccctgcagacaatgcgagagaatgaatcagaattcaaatatctgcttcactcacggacagaaagactgtttagagtgctttcccgtgtcagaatctcaacccgtttctgtcgtcaaaaaggcgtatcagaaactgtgctacattcatcatatcatgggaaaggtgccagacgcttgcactgcctgcgatctggtcaatgtggatttggatgactgcatctttgaacaataaatgatttaaatcaggtatggctgccgatggttatcttccagattggctcgaggacaaccttagtgaaggaattcgcgagtggtgggctttgaaaccaggagcccctcaacccaaggcaaatcaacaacatcaagacaacgctcgaggtcttgtgcttccgggttacaaataccttggacccggcaacggactcgacaagggggagccggtgaacgcagcagacgcggcggccctcgagcacgacaaggcctacgaccagcagctgaaggccggagacaacccgtacctcaagtacaaccacgccgacgccgagttccaggagcggctgaaagaagatacgtcttttgggggcaacctcgggcgagcagtcttccaggccaaaaagaggcttctagaacctcttggtctggttgaggaagcggctaagacggctcctggaaagaagaggcctgtagagcagtctcctcaggaaccggactcctccgcgggtattggcaaatcgggtgcacagcccgctaaaaagagactcaatttcggtcagactggcgacacagagtcagtcccagaccctcaaccaatcggagaacctcccgcagccccctcaggtgtgggatctcttacaatggcttcaggtggtggcgcaccagtggcagacaataacgaaggtgccgatggagtgggtagttcctcgggaaattggcattgcgattcccaatggctgggggacagagtcatcaccaccagcacccgaacctgggccctgcccacctacaacaatcacctctacaagcaaatctccaacagcacatctggaggatcttcaaatgacaacgcctacttcggctacagcaccccctgggggtattttgacttcaacagattccactgccacttctcaccacgtgactggcagcgactcatcaacaacaactggggattccggcctaagcgactcaacttcaagctcttcaacattcaggtcaaagaggttacggacaacaatggagtcaagaccatcgccaataaccttaccagcacggtccaggtcttcacggactcagactatcagctcccgtacgtgctcgggtcggctcacgagggctgcctcccgccgttcccagcggacgttttcatgattcctcagtacgggtatctgacgcttaatgatggaagccaggccgtgggtcgttcgtccttttactgcctggaatatttcccgtcgcaaatgctaagaacgggtaacaacttccagttcagctacgagtttgagaacgtacctttccatagcagctacgctcacagccaaagcctggaccgactaatgaatccactcatcgaccaatacttgtactatctctcaaagactattaacggttctggacagaatcaacaaacgctaaaattcagtgtggccggacccagcaacatggctgtccagggaagaaactacatacctggacccagctaccgacaacaacgtgtctcaaccactgtgactcaaaacaacaacagcgaatttgcttggcctggagcttcttcttgggctctcaatggacgtaatagcttgatgaatcctggacctgctatggccagccacaaagaaggagaggaccgtttctttcctttgtctggatctttaatttttggcaaacaaggaactggaagagacaacgtggatgcggacaaagtcatgataaccaacgaagaagaaattaaaactactaacccggtagcaacggagtcctatggacaagtggccacaaaccaccagagtgcccaagcacaggcgcagaccggctgggttcaaaaccaaggaatacttccgggtatggtttggcaggacagagatgtgtacctgcaaggacccatttgggccaaaattcctcacacggacggcaactttcacccttctccgctgatgggagggtttggaatgaagcacccgcctcctcagatcctcatcaaaaacacacctgtacctgcggatcctccaacggccttcaacaaggacaagctgaactctttcatcacccagtattctactggccaagtcagcgtggagatcgagtgggagctgcagaaggaaaacagcaagcgctggaacccggagatccagtacacttccaactattacaagtctaataatgttgaatttgctgttaatactgaaggtgtatatagtgaaccccgccccattggcaccagatacctgactcgtaatctgtaattgcctgttaatcaataaaccggttgattcgtttcagttgaactttggtctctgcgaagggcgaattcgtttaaacctgcaggactagagccgaattctgcatcgcgatagggataacagggtaataaataatgtactagagacactttcaataaaggcaaatgcttttatttgtacactctcgggtgattatttacccccacccttgccgtctgcgccgttcagaagtcgaaggggttctgtctggcatcggaatgggccacgggcagagacacgttccggtactggtgcttggtggaccacttgaactcaggcacgaccattctaggcagctctgtgaagttctcgctccacaggctccgcaccatcaccagggcgttcagcaggtcaggggcgctgattttgaagtcgcagttaggtccgccgccctgggctctgctgtttctgtacacagggttgcagcactggaacacaataagagcagggtggtgcacgctggccagcacagacttgtcgctgatcaggtcggcgtcgagatcctcggcgttagacaaggcaaaaggggtcagcttgggcagctggcggcccaggaaaggggcgtggccgggcttgctattgcactcgcatctcagaggcatcagcaggtggccgtggccggtctgggcgttggggtacagggcctgcataaaggccttgatctgtttgaaggccacttgggccttggcgccttcggagaagaacatgccgcagcttttgccgctgaactggttggcggggcaggcggcgtcgtgcacacaacaccgggcgtcggtattgctgatctgcaccacgtttctgccccatctgttcttcacgatcttggccttgctgctctgctctttcagggccctctggccgttctcagaggtgacgtccatctcgatcacatgttccttgttgatcatgatgctgccgtgcagacacttcagctcgccctcgatttccgcgcatctgtgcagccacagggcacaaccggtaggctcgtggtgcttgtatgtcacctcagcaaaagattgcaggtaggcttgcaggaatctgcccatcatggtcacgaaggtcttgttggaggtaaaagtcagctgcagtcctctgtgttcctcgttcagccatgtcttgcacacggcggccagagcctcgacctgatctggcagcagcttgaaattagccttcaggtcgttgtccacgtgatacttatccatcagtgctctggcggcttccatgcccttctcccaggcggaaacgatgggcacgctcagggggttcatcacggtgatctcgctttcagcttctgaaggttcctcctcttcctcctgtgttctcatgccccgagccacggggtcgtcctcattcagtctccgcacggttctttttcctccctttccgtgcttaatcagtacaggaggattagagaagcccaccatctggagggcgacgtcctccctttcttcttcgctatccacgatcacttctgggctggggggccgttcaggctttgggctaggccgtttttttttcttcttaggggcgatagccagatcagcggcgcttgtagagggccgaggactaggggttctaggcacgagggcgtcctggctgctgtcctcctcatcctcgctctcgatccgtctccgcattctcttcttagggggggcccgcggagggggagggctagggctaggggacgacacatcttccatggttggaggtctgcgagcagcgcctctgcctctctctggtgttgtctcgcgctgttcttcctctctagaggccatttccttctcctataggcagaaaaagatcgttgaaactcactccggggctgtggacgtcggcttaccttcgcaaatttgtacctgaggactaccacgcccacgagattaggttctacgaagaccaatcccgcccgcctaatgcggagcttaccgcctgcgtcattacccagggccacattcttggccaattgcaagccatcaacaaagcccgccaagagtttctgctacgaaagggacggggggtttacttggacccccagtccggcgaggagctcaacccaatccccccgccgccgcagccctatcagcagcagccgcgggcccttgcttcccaggatggcacccaaaaagaagctgcagctgccgccgccacccacggacgaggaggaatactgggacagtcaggcagaggaggttttggacgaggaggaggaggacatgatggaagactgggagagcctagacgaggaagcttccgaggtcgaagaggtgtcagacgaaacaccgtcaccctcggtcgcattcccctcgccggcgccccagaaatcggcaaccggttccagcatggctacaacctccgctcctcaggcgccgccggcactgcccgttcgccgacccaaccgtagatgggacaccactggaaccagggccggtaagtccaagcagccgccgccgttagcccaagagcaacaacagcgccaaggctaccgctcatggcgcgggcacaagaacgccatagttgcttgcttgcaagactgtgggggcaacatctccttcgcccgccgctttcttctctaccatcacggcgtggccttcccccgtaacatcctgcattactaccgtcatctctacagcccatactgcaccggcggcagcggcagcaacagcagcggccacacagaagcaaaggcgaccggatagcaagactctgacaaagcccaagaaatccacagcggcggcagcagcaggaggaggagcgctgcgtctggcgcccaacgaacccgtatcgacccgcgagcttagaaacaggatttttcccactctgtatgctatatttcaacagagcaggggccaagaacaagagctgaaaataaaaaacaggtctctgcgatccctcacccgcagctgcctgtatcacaaaagcgaagatcagcttcggcgcacgctggaagacgcggaggctctcttcagtaaatactgcgcgctgactcttaaggactagtttcgcgccctttctcaaatttaagcgcgaaaactacgtcatctccagcggccacacccggcgccagcacctgttgtcagcgccattttttagggcggagtaacttgtatgtgttgggaattgtagttttcttaaaatgggaagtgacgtaacgtgggaaaacggaagtgacgatttgaggaagttgtgggttttttggctttcgtttctgggcgtaggttcgcgtgcggttttctgggtgttttttgtggactttaaccgttacgtcattttttagtcctatatatactcgctctgcacttggcccttttttacactgtgactgattgagctggtgccgtgtcgagtggtgtttttttaataggttttcttttttactggtaaggctgactgttatgactacgtccggcgttccatttggcatgacactacgaccaacacgatctcggttgtctcggcgcactccgtacagtagggatcgtctacctccttttgagacagaaacccgcgctaccatactggaggatcatccgctgctgcccgaatgtaacactttgacaatgcacaacgtgagttacgtgcgaggtcttccctgcagtgtgggatttacgctgattcaggaatgggttgttccctgggatatggttctaacgcgggaggagcttgtaatcctgaggaagtgtatgcacgtgtgcctgtgttgtgccaacattgatatcatgacgagcatgatgatccatggttacgagtcctgggctctccactgtcattgttccagtcccggttccctgcagtgtatagccggcgggcaggttttggccagctggtttaggatggtggtggatggcgccatgtttaatcagaggtttatatggtaccgggaggtggtgaattacaacatgccaaaagaggtaatgtttatgtccagcgtgtttatgaggggtcgccacttaatctacctgcgcttgtggtatgatggccacgtgggttctgtggtccccgccatgagctttggatacagcgccttgcactgtgggattttgaacaatattgtggtgctgtgctgcagttactgtgctgatttaagtgagatcagggtgcgctgctgtgcccggaggacaaggcgccttatgctgcgggcggtgcgaatcatcgctgaggagaccactgccatgttgtattcctgcaggacggagcggcggcggcagcagtttattcgcgcgctgctgcagcaccaccgccctatcctgatgcacgattatgactctacccccatgtaggcgtggacttctccttcgccgcccgttaagcaaccgcaagttggacagcagcctgtggctcagcagctggacagcgacatgaacttaagtgagctgcccggggagtttattaatatcactgatgagcgtttggctcgacaggaaaccgtgtggaatataacacctaagaatatgtctgttacccatgatatgatgctttttaaggccagccggggagaaaggactgtgtactctgtgtgttgggagggaggtggcaggttgaatactagggttctgtgagtttgattaaggtacggtgatctgtataagctatgtggtggtggggctatactactgaatgaaaaatgacttgaaattttctgcaattgaaaaataaacacgttgaaacataacacaaacgattctttattcttgggcaatgtatgaaaaagtgtaagaggatgtggcaaatatttcattaatgtagttgtggccagaccagtcccatgaaaatgacatagagtatgcacttggagttgtgtctcctgtttcctgtgtaccgtttagtgtaatggttagtgttacaggtttagttttgtctccgtttaagtaaacttgactgacaatgttacttttggcagttttaccgtgagattttggataagctgataggttaggcataaatccaacagcgtttgtataggctgtcgcccctcctgacgcggtaggaggaggggagggtgccctgcatgtctgccgctgctcttgctcttgccgctgctgaggaggggggcgcatctgccgcagcaccggatgcatctgggaaaagcaaaaaaggggctcgtccctgtttccggaggaatttgcaagcggggtcttgcatgacggggaggcaaacccccgttcgccgcagtccggccggtccgagactcgaaccgggggtcccgcgactcaacccttggaaaataaccctccggctacagggagcgagccacttaatgctttcgctttccagcctaaccgcttacgctgcgcgcggccagtggccaaaaaagctagcgcagcagccgccgcgcctggaaggaagccaaaaggagcactcccccgttgtctgacgtcgcacacctgggttcgacacgcgggcggtaaccgcatggatcacggcggacggccggatacggggctcgaaccccggtcgtccgccatgatacccttgcgaatttatccaccagaccacggaagagtgcccgcttacaggctctccttttgcacggtctagagcgtcaacgattgcgcgcgcctgaccggccagagcgtcccgaccatggagcactttttgccgctgcgcaacatctggaaccgcgtccgcgactttccgcgcgcctccaccaccgccgccggcatcacctggatgtccaggtacatctacggata

SEQ ID NO: 264 - DNA, 12582 bp, synthetic construct
  source 1..12582: mol_type = other DNA
tcgcgcgtttcggtgatgacggtgaaaacctctgacacatgcagctcccggagacggtcacagcttgtctgtaagcggatgccgggagcagacaagcccgtcagggcgcgtcagcgggtgttggcgggtgtcggggctggcttaactatgcggcatcagagcagattgtactgagagtgcaccatatgcggtgtgaaataccgcacagatgcgtaaggagaaaataccgcatcaggcgccattcgccattcaggctgcgcaactgttgggaagggcgatcggtgcgggcctcttcgctattacgccagctggcgaaagggggatgtgctgcaaggcgattaagttgggtaacgccagggttttcccagtcacgacgttgtaaaacgacggccagagaattccgcagggtctccattttgaagcgggaggtttgaacgcgcagccgccatgccggggttttacgagattgtgattaaggtccccagcgaccttgacgagcatctgcccggcatttctgacagctttgtgaactgggtggccgagaaggaatgggagttgccgccagattctgacatggatctgaatctgattgagcaggcacccctgaccgtggccgagaagctgcagcgcgactttctgacggaatggcgccgtgtgagtaaggccccggaggctcttttctttgtgcaatttgagaagggagagagctacttccacatgcacgtgctcgtggaaaccaccggggtgaaatccatggttttgggacgtttcctgagtcagattcgcgaaaaactgattcagagaatttaccgcgggatcgagccgactttgccaaactggttcgcggtcacaaagaccagaaatggcgccggaggcgggaacaaggtggtggatgagtgctacatccccaattacttgctccccaaaacccagcctgagctccagtgggcgtggactaatatggaacagtatttaagcgcctgtttgaatctcacggagcgtaaacggttggtggcgcagcatctgacgcacgtgtcgcagacgcaggagcagaacaaagagaatcagaatcccaattctgatgcgccggtgatcagatcaaaaacttcagccaggtacatggagctggtcgggtggctcgtggacaaggggattacctcggagaagcagtggatccaggaggaccaggcctcatacatctccttcaatgcggcctccaactcgcggtcccaaatcaaggctgccttggacaatgcgggaaagattatgagcctgactaaaaccgcccccgactacctggtgggccagcagcccgtggaggacatttccagcaatcggatttataaaattttggaactaaacgggtacgatccccaatatgcggcttccgtctttctgggatgggccacgaaaaagttcggcaagaggaacaccatctggctgtttgggcctgcaactaccgggaagaccaacatcgcggaggccatagcccacactgtgcccttctacgggtgcgtaaactggaccaatgagaactttcccttcaacgactgtgtcgacaagatggtgatctggtgggaggaggggaagatgaccgccaaggtcgtggagtcggccaaagccattctcggaggaagcaaggtgcgcgtggaccagaaatgcaagtcctcggcccagatagacccgactcccgtgatcgtcacctccaacaccaacatgtgcgccgtgattgacgggaactcaacgaccttcgaacaccagcagccgttgcaagaccggatgttcaaatttgaactcacccgccgtctggatcatgactttgggaaggtcaccaagcaggaagtcaaagactttttccggtgggcaaaggatcacgtggttgaggtggagcatgaattctacgtcaaaaagggtggagccaagaaaagacccgcccccagtgacgcagatataagtgagcccaaacgggtgcgcgagtcagttgcgcagccatcgacgtcagacgcggaagcttcgatcaactacgcagacaggtaccaaaacaaatgttctcgtcacgtgggcatgaatctgatgctgtttccctgcagacaatgcgagagaatgaatcagaattcaaatatctgcttcactcacggacagaaagactgtttagagtgctttcccgtgtcagaatctcaacccgtttctgtcgtcaaaaaggcgtatcagaaactgtgctacattcatcatatcatgggaaaggtgccagacgcttgcactgcctgcgatctggtcaatgtggatttggatgactgcatctttgaacaataaatgatttaaatcaggtatggctgccgatggttatcttccagattggctcgaggacaaccttagtgaaggaattcgcgagtggtgggctttgaaaccaggagcccctcaacccaaggcaaatcaacaacatcaagacaacgctcgaggtcttgtgcttccgggttacaaataccttggacccggcaacggactcgacaagggggagccggtgaacgcagcagacgcggcggccctcgagcacgacaaggcctacgaccagcagctgaaggccggagacaacccgtacctcaagtacaaccacgccgacgccgagttccaggagcggctgaaagaagatacgtcttttgggggcaacctcgggcgagcagtcttccaggccaaaaagaggcttctagaacctcttggtctggttgaggaagcggctaagacggctcctggaaagaagaggcctgtagagcagtctcctcaggaaccggactcctccgcgggtattggcaaatcgggtgcacagcccgctaaaaagagactcaatttcggtcagactggcgacacagagtcagtcccagaccctcaaccaatcggagaacctcccgcagccccctcaggtgtgggatctcttacaatggcttcaggtggtggcgcaccagtggcagacaataacgaaggtgccgatggagtgggtagttcctcgggaaattggcattgcgattcccaatggctgggggacagagtcatcaccaccagcacccgaacctgggccctgcccacctacaacaatcacctctacaagcaaatctccaacagcacatctggaggatcttcaaatgacaacgcctacttcggctacagcaccccctgggggtattttgacttcaacagattccactgccacttctcaccacgtgactggcagcgactcatcaacaacaactggggattccggcctaagcgactcaacttcaagctcttcaacattcaggtcaaagaggttacggacaacaatggagtcaagaccatcgccaataaccttaccagcacggtccaggtcttcacggactcagactatcagctcccgtacgtgctcgggtcggctcacgagggctgcctcccgccgttcccagcggacgttttcatgattcctcagtacgggtatctgacgcttaatgatggaagccaggccgtgggtcgttcgtccttttactgcctggaatatttcccgtcgcaaatgctaagaacgggtaacaacttccagttcagctacgagtttgagaacgtacctttccatagcagctacgctcacagccaaagcctggaccgactaatgaatccactcatcgaccaatacttgtactatctctcaaagactattaacggttctggacagaatcaacaaacgctaaaattcagtgtggccggacccagcaacatggctgtccagggaagaaactacatacctggacccagctaccgacaacaacgtgtctcaaccactgtgactcaaaacaacaacagcgaatttgcttggcctggagcttcttcttgggctctcaatggacgtaatagcttgatgaatcctggacctgctatggccagccacaaagaaggagaggaccgtttctttcctttgtctggatctttaatttttggcaaacaaggaactggaagagacaacgtggatgcggacaaagtcatgataaccaacgaagaagaaattaaaactactaacccggtagcaacggagtcctatggacaagtggccacaaaccaccagagtgcccaagcacaggcgcagaccggctgggttcaaaaccaaggaatacttccgggtatggtttggcaggacagagatgtgtacctgcaaggacccatttgggccaaaattcctcacacggacggcaactttcacccttctccgctgatgggagggtttggaatgaagcacccgcctcctcagatcctcatcaaaaacacacctgtacctgcggatcctccaacggccttcaacaaggacaagctgaactctttcatcacccagtattctactggccaagtcagcgtggagatcgagtgggagctgcagaaggaaaacagcaagcgctggaacccggagatccagtacacttccaactattacaagtctaataatgttgaatttgctgttaatactgaaggtgtatatagtgaaccccgccccattggcaccagatacctgactcgtaatctgtaattgcctgttaatcaataaaccggttgattcgtttcagttgaactttggtctctgcgaagggcgaattcgtttaaacctgcaggactagagccgaattctgcatcgcgatagggataacagggtaataaataatgtactagagacactttcaataaaggcaaatgcttttatttgtacactctcgggtgattatttacccccacccttgccgtctgcgccgttcagaagtcgaaggggttctgtctggcatcggaatgggccacgggcagagacacgttccggtactggtgcttggtggaccacttgaactcaggcacgaccattctaggcagctctgtgaagttctcgctccacaggctccgcaccatcaccagggcgttcagcaggtcaggggcgctgattttgaagtcgcagttaggtccgccgccctgggctctgctgtttctgtacacagggttgcagcactggaacacaataagagcagggtggtgcacgctggccagcacagacttgtcgctgatcaggtcggcgtcgagatcctcggcgttagacaaggcaaaaggggtcagcttgggcagctggcggcccaggaaaggggcgtggccgggcttgctattgcactcgcatctcagaggcatcagcaggtggccgtggccggtctgggcgttggggtacagggcctgcataaaggccttgatctgtttgaaggccacttgggccttggcgccttcggagaagaacatgccgcagcttttgccgctgaactggttggcggggcaggcggcgtcgtgcacacaacaccgggcgtcggtattgctgatctgcaccacgtttctgccccatctgttcttcacgatcttggccttgctgctctgctctttcagggccctctggccgttctcagaggtgacgtccatctcgatcacatgttccttgttgatcatgatgctgccgtgcagacacttcagctcgccctcgatttccgcgcatctgtgcagccacagggcacaaccggtaggctcgtggtgcttgtatgtcacctcagcaaaagattgcaggtaggcttgcaggaatctgcccatcatggtcacgaaggtcttgttggaggtaaaagtcagctgcagtcctctgtgttcctcgttcagccatgtcttgcacacggcggccagagcctcgacctgatctggcagcagcttgaaattagccttcaggtcgttgtccacgtgatacttatccatcagtgctctggcggcttccatgcccttctcccaggcggaaacgatgggcacgctcagggggttcatcacggtgatctcgctttcagcttctgaaggttcctcctcttcctcctgtgttctcatgccccgagccacggggtcgtcctcattcagtctccgcacggttctttttcctccctttccgtgcttaatcagtacaggaggattagagaagcccaccatctggagggcgacgtcctccctttcttcttcgctatccacgatcacttctgggctggggggccgttcaggctttgggctaggccgtttttttttcttcttaggggcgatagccagatcagcggcgcttgtagagggccgaggactaggggttctaggcacgagggcgtcctggctgctgtcctcctcatcctcgctctcgatccgtctccgcattctcttcttagggggggcccgcggagggggagggctagggctaggggacgacacatcttccatggttggaggtctgcgagcagcgcctctgcctctctctggtgttgtctcgcgctgttcttcctctctagaggccatttccttctcctataggcagaaaaagatcgttgaaactcactccggggctgtggacgtcggcttaccttcgcaaatttgtacctgaggactaccacgcccacgagattaggttctacgaagaccaatcccgcccgcctaatgcggagcttaccgcctgcgtcattacccagggccacattcttggccaattgcaagccatcaacaaagcccgccaagagtttctgctacgaaagggacggggggtttacttggacccccagtccggcgaggagctcaacccaatccccccgccgccgcagccctatcagcagcagccgcgggcccttgcttcccaggatggcacccaaaaagaagctgcagctgccgccgccacccacggacgaggaggaatactgggacagtcaggcagaggaggttttggacgaggaggaggaggacatgatggaagactgggagagcctagacgaggaagcttccgaggtcgaagaggtgtcagacgaaacaccgtcaccctcggtcgcattcccctcgccggcgccccagaaatcggcaaccggttccagcatggctacaacctccgctcctcaggcgccgccggcactgcccgttcgccgacccaaccgtagatgggacaccactggaaccagggccggtaagtccaagcagccgccgccgttagcccaagagcaacaacagcgccaaggctaccgctcatggcgcgggcacaagaacgccatagttgcttgcttgcaagactgtgggggcaacatctccttcgcccgccgctttcttctctaccatcacggcgtggccttcccccgtaacatcctgcattactaccgtcatctctacagcccatactgcaccggcggcagcggcagcaacagcagcggccacacagaagcaaaggcgaccggatagcaagactctgacaaagcccaagaaatccacagcggcggcagcagcaggaggaggagcgctgcgtctggcgcccaacgaacccgtatcgacccgcgagcttagaaacaggatttttcccactctgtatgctatatttcaacagagcaggggccaagaacaagagctgaaaataaaaaacaggtctctgcgatccctcacccgcagctgcctgtatcacaaaagcgaagatcagcttcggcgcacgctggaagacgcggaggctctcttcagtaaatactgcgcgctgactcttaaggactagtttcgcgccctttctcaaatttaagcgcgaaaactacgtcatctccagcggccacacccggcgccagcacctgttgtcagcgccattttttagggcggagtaacttgtatgtgttgggaattgtagttttcttaaaatgggaagtgacgtaacgtgggaaaacggaagtgacgatttgaggaagttgtgggttttttggctttcgtttctgggcgtaggttcgcgtgcggttttctgggtgttttttgtggactttaaccgttacgtcattttttagtcctatatatactcgctctgcacttggcccttttttacactgtgactgattgagctggtgccgtgtcgagtggtgtttttttaataggttttcttttttactggtaaggctgactgttatgactacgtccggcgttccatttggcatgacactacgaccaacacgatctcggttgtctcggcgcactccgtacagtagggatcgtctacctccttttgagacagaaacccgcgctaccatactggaggatcatccgctgctgcccgaatgtaacactttgacaatgcacaacgtgagttacgtgcgaggtcttccctgcagtgtgggatttacgctgattcaggaatgggttgttccctgggatatggttctaacgcgggaggagcttgtaatcctgaggaagtgtatgcacgtgtgcctgtgttgtgccaacattgatatcatgacgagcatgatgatccatggttacgagtcctgggctctccactgtcattgttccagtcccggttccctgcagtgtatagccggcgggcaggttttggccagctggtttaggatggtggtggatggcgccatgtttaatcagaggtttatatggtaccgggaggtggtgaattacaacatgccaaaagaggtaatgtttatgtccagcgtgtttatgaggggtcgccacttaatctacctgcgcttgtggtatgatggccacgtgggttctgtggtccccgccatgagctttggatacagcgccttgcactgtgggattttgaacaatattgtggtgctgtgctgcagttactgtgctgatttaagtgagatcagggtgcgctgctgtgcccggaggacaaggcgccttatgctgcgggcggtgcgaatcatcgctgaggagaccactgccatgttgtattcctgcaggacggagcggcggcggcagcagtttattcgcgcgctgctgcagcaccaccgccctatcctgatgcacgattatgactctacccccatgtaggcgtggacttctccttcgccgcccgttaagcaaccgcaagttggacagcagcctgtggctcagcagctggacagcgacatgaacttaagtgagctgcccggggagtttattaatatcactgatgagcgtttggctcgacaggaaaccgtgtggaatataacacctaagaatatgtctgttacccatgatatgatgctttttaaggccagccggggagaaaggactgtgtactctgtgtgttgggagggaggtggcaggttgaatactagggttctgtgagtttgattaaggtacggtgatctgtataagctatgtggtggtggggctatactactgaatgaaaaatgacttgaaattttctgcaattgaaaaataaacacgttgaaacataacacaaacgattctttattcttgggcaatgtatgaaaaagtgtaagaggatgtggcaaatatttcattaatgtagttgtggccagaccagtcccatgaaaatgacatagagtatgcacttggagttgtgtctcctgtttcctgtgtaccgtttagtgtaatggttagtgttacaggtttagttttgtctccgtttaagtaaacttgactgacaatgttacttttggcagttttaccgtgagattttggataagctgataggttaggcataaatccaacagcgtttgtataggctgtcgcccctcctgacgcggtaggaggaggggagggtgccctgcatgtctgccgctgctcttgctcttgccgctgctgaggaggggggcgcatctgccgcagcaccggatgcatctgggaaaagcaaaaaaggggctcgtccctgtttccggaggaatttgcaagcggggtcttgcatgacggggaggcaaacccccgttcgccgcagtccggccggtccgagactcgaaccgggggtcccgcgactcaacccttggaaaataaccctccggctacagggagcgagccacttaatgctttcgctttccagcctaaccgcttacgctgcgcgcggccagtggccaaaaaagctagcgcagcagccgccgcgcctggaaggaagccaaaaggagcactcccccgttgtctgacgtcgcacacctgggttcgacacgcgggcggtaaccgcatggatcacggcggacggccggatacggggctcgaaccccggtcgtccgccatgatacccttgcgaatttatccaccagaccacggaagagtgcccgcttacaggctctccttttgcacggtctagagcgtcaacgattgcgcgcgcctgaccggccagagcgtcccgaccatggagcactttttgccgctgcgcaacatctggaaccgcgtccgcgactttccgcgcgcctccaccaccgccgccggcatcacctggatgtccaggtacatctacggatatggcaaacagctattatgggtattatgggtgcggccgcggatcccgggcccgtcgactgcagaggcctgcatgcaagcttggtgtaatcatggtcatagctgtttcctgtgtgaaattgttatccgctcacaattccacacaacatacgagccggaagcataaagtgtaaagcctggggtgcctaatgagtgagctaactcacattaattgcgttgcgctcactgcccgctttccagtcgggaaacctgtcgtgccagctgcattaatgaatcggccaacgcgcggggagaggcggtttgcgtattgggcgctcttccgcttcctcgctcactgactcgctgcgctcggtcgttcggctgcggcgagcggtatcagctcactcaaaggcggtaatacggttatccacagaatcaggggataacgcaggaaagaacatgtgagcaaaaggccagcaaaaggccaggaaccgtaaaaaggccgcgttgctggcgtttttccataggctccgcccccctgacgagcatcacaaaaatcgacgctcaagtcagaggtggcgaaacccgacaggactataaagataccaggcgtttccccctggaagctccctcgtgcgctctcctgttccgaccctgccgcttaccggatacctgtccgcctttctcccttcgggaagcgtggcgctttctcatagctcacgctgtaggtatctcagttcggtgtaggtcgttcgctccaagctgggctgtgtgcacgaaccccccgttcagcccgaccgctgcgccttatccggtaactatcgtcttgagtccaacccggtaagacacgacttatcgccactggcagcagccactggtaacaggattagcagagcgaggtatgtaggcggtgctacagagttcttgaagtggtggcctaactacggctacactagaagaacagtatttggtatctgcgctctgctgaagccagttaccttcggaaaaagagttggtagctcttgatccggcaaacaaaccaccgctggtagcggtggtttttttgtttgcaagcagcagattacgcgcagaaaaaaaggatctcaagaagatcctttgatcttttctacggggtctgacgctcagtggaacgaaaactcacgttaagggattttggtcatgagattatcaaaaaggatcttcacctagaaggtcctgtattagaggtcacgtgagtgttttgcgacattttgcgacaccatgtggtcacgctgggtatttaagcccgagtgagcacgcagggtctccattttgaagcgggaggtttgaacgcgcagccgccatccttttaaattaaaaatgaagttttaaatcaagcccaatctgaataatgttacaaccaattaaccaattctgattagaaaaactcatcgagcatcaaatgaaactgcaatttattcatatcaggattatcaataccatatttttgaaaaagccgtttctgtaatgaaggagaaaactcaccgaggcagttccataggatggcaagatcctggtatcggtctgcgattccgactcgtccaacatcaatacaacctattaatttcccctcgtcaaaaataaggttatcaagtgagaaatcaccatgagtgacgactgaatccggtgagaatggcaaaagtttatgcatttctttccagacttgttcaacaggccagccattacgctcgtcatcaaaatcactcgcatcaaccaaaccgttattcattcgtgattgcgcctgagcgagacgaaatacgcgatcgctgttaaaaggacaattacaaacaggaatcgaatgcaaccggcgcaggaacactgccagcgcatcaacaatattttcacctgaatcaggatattcttctaatacctggaatgctgtttttccggggatcgcagtggtgagtaaccatgcatcatcaggagtacggataaaatgcttgatggtcggaagaggcataaattccgtcagccagtttagtctgaccatctcatctgtaacatcattggcaacgctacctttgccatgtttcagaaacaactctggcgcatcgggcttcccatacaagcgatagattgtcgcacctgattgcccgacattatcgcgagcccatttatacccatataaatcagcatccatgttggaatttaatcgcggcctcgacgtttcccgttgaatatggctcataacaccccttgtattactgtttatgtaagcagacagttttattgttcatgatgatatatttttatcttgtgcaatgtaacatcagagattttgagacacgggccagagctgca

SEQ ID NO: 265 - DNA, 5505 bp, synthetic construct; identical to SEQ ID NO: 106
  source 1..5505: mol_type = other DNA

SEQ ID NO: 266 - DNA, 5505 bp, synthetic construct; identical to SEQ ID NO: 106
  source 1..5505: mol_type = other DNA

SEQ ID NO: 267 - DNA, 14590 bp, synthetic construct
  source 1..14590: mol_type = other DNA
atgccggggttttacgagattgtgattaaggtccccagcgaccttgacgagcatctgcccggcatttctgacagctttgtgaactgggtggccgagaaggaatgggagttgccgccagattctgacatggatctgaatctgattgagcaggcacccctgaccgtggccgagaagctgcagcgcgactttctgacggaatggcgccgtgtgagtaaggccccggaggctcttttctttgtgcaatttgagaagggagagagctacttccacatgcacgtgctcgtggaaaccaccggggtgaaatccatggttttgggacgtttcctgagtcagattcgcgaaaaactgattcagagaatttaccgcgggatcgagccgactttgccaaactggttcgcggtcacaaagaccagaaatggcgccggaggcgggaacaaggtggtggatgagtgctacatccccaattacttgctccccaaaacccagcctgagctccagtgggcgtggactaatatggaacagtatttaagcgcctgtttgaatctcacggagcgtaaacggttggtggcgcagcatctgacgcacgtgtcgcagacgcaggagcagaacaaagagaatcagaatcccaattctgatgcgccggtgatcagatcaaaaacttcagccaggtacatggagctggtcgggtggctcgtggacaaggggattacctcggagaagcagtggatccaggaggaccaggcctcatacatctccttcaatgcggcctccaactcgcggtcccaaatcaaggctgccttggacaatgcgggaaagattatgagcctgactaaaaccgcccccgactacctggtgggccagcagcccgtggaggacatttccagcaatcggatttataaaattttggaactaaacgggtacgatccccaatatgcggcttccgtctttctgggatgggccacgaaaaagttcggcaagaggaacaccatctggctgtttgggcctgcaactaccgggaagaccaacatcgcggaggccatagcccacactgtgcccttctacgggtgcgtaaactggaccaatgagaactttcccttcaacgactgtgtcgacaagatggtgatctggtgggaggaggggaagatgaccgccaaggtcgtggagtcggccaaagccattctcggaggaagcaaggtgcgcgtggaccagaaatgcaagtcctcggcccagatagacccgactcccgtgatcgtcacctccaacaccaacatgtgcgccgtgattgacgggaactcaacgaccttcgaacaccagcagccgttgcaagaccggatgttcaaatttgaactcacccgccgtctggatcatgactttgggaaggtcaccaagcaggaagtcaaagactttttccggtgggcaaaggatcacgtggttgaggtggagcatgaattctacgtcaaaaagggtggagccaagaaaagacccgcccccagtgacgcagatataagtgagcccaaacgggtgcgcgagtcagttgcgcagccatcgacgtcagacgcggaagcttcgatcaactacgcagacaggtaccaaaacaaatgttctcgtcacgtgggcatgaatctgatgctgtttccctgcagacaatgcgagagaatgaatcagaattcaaatatctgcttcactcacggacagaaagactgtttagagtgctttcccgtgtcagaatctcaacccgtttctgtcgtcaaaaaggcgtatcagaaactgtgctacattcatcatatcatgggaaaggtgccagacgcttgcactgcctgcgatctggtcaatgtggatttggatgactgcatctttgaacaataaatgatttaaatcaggtatggctgccgatggttatcttccagattggctcgaggacaacctctctgagggcattcgcgagtggtgggcgctgaaacctggagccccgaagcccaaagccaaccagcaaaagcaggacgacggccggggtctggtgcttcctggctacaagtacctcggacccttcaacggactcgacaagggggagcccgtcaacgcggcggacgcagcggccctcgagcacgacaaggcctacgaccagcagctgcaggcgggtgacaatccgtacctgcggtataaccacgccgacgccgagtttcaggagcgtctgcaagaagatacgtcttttgggggcaacctcgggcgagcagtcttccaggccaagaagcgggttctcgaacctctcggtctggttgaggaaggcgctaagacggctcctggaaagaagagaccggtagagccatcaccccagcgttctccagactcctctacgggcatcggcaagaaaggccaacagcccgccagaaaaagactcaattttggtcagactggcgactcagagtcagttccagaccctcaacctctcggagaacctccagcagcgccctctggtgtgggacctaatacaatggctgcaggcggtggcgcaccaatggcagacaataacgaaggcgccgacggagtgggtagttcctcgggaaattggcattgcgattccacatggctgggcgacagagtcatcaccaccagcacccgaacctgggccctgcccacctacaacaaccacctctacaagcaaatctccaacgggacatcgggaggagccaccaacgacaacacctacttcggctacagcaccccctgggggtattttgactttaacagattccactgccacttttcaccacgtgactggcagcgactcatcaacaacaactggggattccggcccaagagactcagcttcaagctcttcaacatccaggtcaaggaggtcacgcagaatgaaggcaccaagaccatcgccaataacctcaccagcaccatccaggtgtttacggactcggagtaccagctgccgtacgttctcggctctgcccaccagggctgcctgcctccgttcccggcggacgtgttcatgattccccagtacggctacctaacactcaacaacggtagtcaggccgtgggacgctcctccttctactgcctggaatactttccttcgcagatgctgagaaccggcaacaacttccagtttacttacaccttcgaggacgtgcctttccacagcagctacgcccacagccagagcttggaccggctgatgaatcctctgattgaccagtacctgtactacttgtctcggactcaaacaacaggaggcacggcaaatacgcagactctgggcttcagccaaggtgggcctaatacaatggccaatcaggcaaagaactggctgccaggaccctgttaccgccaacaacgcgtctcaacgacaaccgggcaaaacaacaatagcaactttgcctggactgctgggaccaaataccatctgaatggaagaaattcattggctaatcctggcatcgctatggcaacacacaaagacgacgaggagcgtttttttcccagtaacgggatcctgatttttggcaaacaaaatgctgccagagacaatgcggattacagcgatgtcatgctcaccagcgaggaagaaatcaaaaccactaaccctgtggctacagaggaatacggtatcgtggcagataacttgcagcagcaaaacacggctcctcaaattggaactgtcaacagccagggggccttacccggtatggtctggcagaaccgggacgtgtacctgcagggtcccatctgggccaagattcctcacacggacggcaacttccacccgtctccgctgatgggcggctttggcctgaaacatcctccgcctcagatcctgatcaagaacacgcctgtacctgcggatcctccgaccaccttcaaccagtcaaagctgaactctttcatcacgcaatacagcaccggacaggtcagcgtggaaattgaatgggagctgcagaaggaaaacagcaagcgctggaaccccgagatccagtacacctccaactactacaaatctacaagtgtggactttgctgttaatacagaaggcgtgtactctgaaccccgccccattggcacccgttacctcacccgtaatctgtaattgcctgttaatcaataaaccggttgattcgtttcagttgaactttggtctctgcgaagggcgaattcgtttaaacctgcaggactagagccgaattctgcattaattaaggccttaattaggctgcgcgctcgctcgctcactgaggccgcccgggcaaagcccgggcgtcgggcgacctttggtcgcccggcctcagtgagcgagcgagcgcgcagagagggagtggccaactccatcactaggggttcctcatatgcagggtaatggggatcctctagaggccgtccgccctcggcaccatcctcacgacacccaaatatggcgacgggtgaggaatggtggggagttatttttagagcggtgaggaaggtgggcaggcagcaggtgttgggggagttatttttagagcggggagttatttttagagcggaggaatggtggacacccaaatatggcgacggttcctcacggacacccaaatatggcgacgggccctcggccggggccgcattcctgggggccgggcggtgctcccgcccgcctcgataaaaggctccggggccggcggcggcccacgagctacccggaggagcgggaggcgccaagcggaattcgccaccatgctttggtgggaagaggtggaagattgctatgagagggaagatgtgcagaagaaaaccttcaccaaatgggtcaatgcccagttcagcaagtttggcaagcagcacattgagaacctgttcagtgacctgcaggatggcagaaggctgctggatctgctggaaggcctgacaggccagaagctgcctaaagagaagggcagcacaagagtgcatgccctgaacaatgtgaacaaggccctgagagtgctgcagaacaacaatgtggacctggtcaatattggcagcacagacattgtggatggcaaccacaagctgaccctgggcctgatctggaacatcatcctgcactggcaagtgaagaatgtgatgaagaacatcatggctggcctgcagcagaccaactctgagaagatcctgctgagctgggtcagacagagcaccagaaactaccctcaagtgaatgtgatcaacttcaccacctcttggagtgatggactggccctgaatgccctgatccacagccacagacctgacctgtttgactggaactctgttgtgtgccagcagtctgccacacagagactggaacatgccttcaacattgccagataccagctgggaattgagaaactgctggaccctgaggatgtggacaccacctatcctgacaagaaatccatcctcatgtacatcaccagcctgttccaggtgctgccccagcaagtgtccattgaggccattcaagaggttgagatgctgcccagacctcctaaagtgaccaaagaggaacacttccagctgcaccaccagatgcactactctcagcagatcacagtgtctctggcccagggatatgagagaacaagcagccccaagcctaggttcaagagctatgcctacacacaggctgcctatgtgaccacatctgaccccacaagaagcccatttccaagccagcatctggaagcccctgaggacaagagctttggcagcagcctgatggaatctgaagtgaacctggatagataccagacagccctggaagaagtgctgtcctggctgctgtctgctgaggatacactgcaggctcagggtgaaatcagcaatgatgtggaagtggtcaaggaccagtttcacacccatgagggctacatgatggacctgacagcccaccagggcagagtgggaaatatcctgcagctgggctccaagctgattggcacaggcaagctgtctgaggatgaagagacagaggtgcaagagcagatgaacctgctgaacagcagatgggagtgtctgagagtggccagcatggaaaagcagagcaacctgcacagagtgctcatggacctgcagaatcagaaactgaaagaactgaatgactggctgaccaagacagaagaaaggactaggaagatggaagaggaacctctgggaccagacctggaagatctgaaaagacaggtgcagcagcataaggtgctgcaagaggaccttgagcaagagcaagtcagagtgaacagcctgacacacatggtggtggttgtggatgagtcctctggggatcatgccacagctgctctggaagaacagctgaaggtgctgggagacagatgggccaacatctgtaggtggacagaggatagatgggtgctgctccaggacattctgctgaagtggcagagactgacagaggaacagtgcctgttttctgcctggctctctgagaaagaggatgctgtcaacaagatccataccacaggcttcaaggatcagaatgagatgctcagctccctgcagaaactggctgtgctgaaggctgacctggaaaagaaaaagcagtccatgggcaagctctacagcctgaagcaggacctgctgtctaccctgaagaacaagtctgtgacccagaaaactgaggcctggctggacaactttgctagatgctgggacaacctggtgcagaagctggaaaagtctacagcccagatcagccagcaacctgatcttgcccctggcctgaccacaattggagcctctccaacacagactgtgaccctggttacccagccagtggtcaccaaagagacagccatcagcaaactggaaatgcccagctctctgatgctggaagtccccacactggaaaggctgcaagaacttcaagaggccacagatgagctggacctgaagctgagacaggctgaagtgatcaaaggcagctggcagccagttggggacctgctcattgatagcctgcaggaccatctggaaaaagtgaaagccctgaggggagagattgcccctctgaaagaaaatgtgtcccatgtgaatgacctggccagacagctgaccacactgggaatccagctgagcccctacaacctgagcacccttgaggacctgaacaccaggtggaagctcctccaggtggcagtggaagatagagtcaggcagctgcatgaggcccacagagattttggaccagccagccagcactttctgtctacctctgtgcaaggcccctgggagagagctatctctcctaacaaggtgccctactacatcaaccatgagacacagaccacctgttgggatcaccccaagatgacagagctgtaccagagtctggcagacctcaacaatgtcagattcagtgcctacaggactgccatgaagctcagaaggctccagaaagctctgtgcctggacctgctttccctgagtgcagcttgtgatgccctggaccagcacaatctgaagcagaatgaccagcctatggacatcctccagatcatcaactgcctcaccaccatctatgataggctggaacaagagcacaacaatctggtcaatgtgcccctgtgtgtggacatgtgcctgaattggctgctgaatgtgtatgacacaggcagaacaggcaggatcagagtcctgtccttcaagacaggcatcatctccctgtgcaaagcccacttggaggacaagtacagatacctgttcaagcaagtggcctccagcacaggcttttgtgaccagagaaggctgggcctgctcctgcatgacagcattcagatccctagacagctgggagaagtggcttcctttggaggcagcaatattgagccatcagtcaggtcctgttttcagtttgccaacaacaagcctgagattgaggctgccctgttcctggactggatgagacttgagcctcagagcatggtctggctgcctgtgcttcatagagtggctgctgctgagactgccaagcaccaggccaagtgcaacatctgcaaagagtgccccatcattggcttcagatacagatccctgaagcacttcaactatgatatctgccagagctgcttctttagtggcagggttgccaagggccacaaaatgcactaccccatggtggaatactgcaccccaacaacctctggggaagatgttagagactttgccaaggtgctgaaaaacaagttcaggaccaagagatactttgctaagcaccccagaatgggctacctgcctgtccagacagtgcttgagggtgacaacatggaaacccctgtgacactgatcaatttctggccagtggactctgcccctgcctcaagtccacagctgtcccatgatgacacccacagcagaattgagcactatgcctccagactggcagagatggaaaacagcaatggcagctacctgaatgatagcatcagccccaatgagagcattgatgatgagcatctgctgatccagcactactgtcagtccctgaaccaggactctccactgagccagcctagaagccctgctcagatcctgatcagccttgagtctgaggaaaggggagagctggaaagaatcctggcagatcttgaggaagagaacagaaacctgcaggcagagtatgacaggctcaaacagcagcatgagcacaagggactgagccctctgccttctcctcctgaaatgatgcccacctctccacagtctccaaggtgatgactcgagaggcctaataaagagctcagatgcatcgatcagagtgtgttggttttttgtgtgccagggtaatgggctagctgcggccgcaggaacccctagtgatggagttggccactccctctctgcgcgctcgctcgctcactgaggccgggcgaccaaaggtcgcccgacgcccgggctttgcccgggcggcctcagtgagcgagcgagcgcgcagccttaattaatcgcgatagggataacagggtaataaataatgtactagagacactttcaataaaggcaaatgcttttatttgtacactctcgggtgattatttacccccacccttgccgtctgcgccgttcagaagtcgaaggggttctgtctggcatcggaatgggccacgggcagagacacgttccggtactggtgcttggtggaccacttgaactcaggcacgaccattctaggcagctctgtgaagttctcgctccacaggctccgcaccatcaccagggcgttcagcaggtcaggggcgctgattttgaagtcgcagttaggtccgccgccctgggctctgctgtttctgtacacagggttgcagcactggaacacaataagagcagggtggtgcacgctggccagcacagacttgtcgctgatcaggtcggcgtcgagatcctcggcgttagacaaggcaaaaggggtcagcttgggcagctggcggcccaggaaaggggcgtggccgggcttgctattgcactcgcatctcagaggcatcagcaggtggccgtggccggtctgggcgttggggtacagggcctgcataaaggccttgatctgtttgaaggccacttgggccttggcgccttcggagaagaacatgccgcagcttttgccgctgaactggttggcggggcaggcggcgtcgtgcacacaacaccgggcgtcggtattgctgatctgcaccacgtttctgccccatctgttcttcacgatcttggccttgctgctctgctctttcagggccctctggccgttctcagaggtgacgtccatctcgatcacatgttccttgttgatcatgatgctgccgtgcagacacttcagctcgccctcgatttccgcgcatctgtgcagccacagggcacaaccggtaggctcgtggtgcttgtatgtcacctcagcaaaagattgcaggtaggcttgcaggaatctgcccatcatggtcacgaaggtcttgttggaggtaaaagtcagctgcagtcctctgtgttcctcgttcagccatgtcttgcacacggcggccagagcctcgacctgatctggcagcagcttgaaattagccttcaggtcgttgtccacgtgatacttatccatcagtgctctggcggcttccatgcccttctcccaggcggaaacgatgggcacgctcagggggttcatcacggtgatctcgctttcagcttctgaaggttcctcctcttcctcctgtgttctcatgccccgagccacggggtcgtcctcattcagtctccgcacggttctttttcctccctttccgtgcttaatcagtacaggaggattagagaagcccaccatctggagggcgacgtcctccctttcttcttcgctatccacgatcacttctgggctggggggccgttcaggctttgggctaggccgtttttttttcttcttaggggcgatagccagatcagcggcgcttgtagagggccgaggactaggggttctaggcacgagggcgtcctggctgctgtcctcctcatcctcgctctcgatccgtctccgcattctcttcttagggggggcccgcggagggggagggctagggctaggggacgacacatcttccatggttggaggtctgcgagcagcgcctctgcctctctctggtgttgtctcgcgctgttcttcctctctagaggccatttccttctcctataggcagaaaaagatcgttgaaactcactccggggctgtggacgtcggcttaccttcgcaaatttgtacctgaggactaccacgcccacgagattaggttctacgaagaccaatcccgcccgcctaatgcggagcttaccgcctgcgtcattacccagggccacattcttggccaattgcaagccatcaacaaagcccgccaagagtttctgctacgaaagggacggggggtttacttggacccccagtccggcgaggagctcaacccaatccccccgccgccgcagccctatcagcagcagccgcgggcccttgcttcccaggatggcacccaaaaagaagctgcagctgccgccgccacccacggacgaggaggaatactgggacagtcaggcagaggaggttttggacgaggaggaggaggacatgatggaagactgggagagcctagacgaggaagcttccgaggtcgaagaggtgtcagacgaaacaccgtcaccctcggtcgcattcccctcgccggcgccccagaaatcggcaaccggttccagcatggctacaacctccgctcctcaggcgccgccggcactgcccgttcgccgacccaaccgtagatgggacaccactggaaccagggccggtaagtccaagcagccgccgccgttagcccaagagcaacaacagcgccaaggctaccgctcatggcgcgggcacaagaacgccatagttgcttgcttgcaagactgtgggggcaacatctccttcgcccgccgctttcttctctaccatcacggcgtggccttcccccgtaacatcctgcattactaccgtcatctctacagcccatactgcaccggcggcagcggcagcaacagcagcggccacacagaagcaaaggcgaccggatagcaagactctgacaaagcccaagaaatccacagcggcggcagcagcaggaggaggagcgctgcgtctggcgcccaacgaacccgtatcgacccgcgagcttagaaacaggatttttcccactctgtatgctatatttcaacagagcaggggccaagaacaagagctgaaaataaaaaacaggtctctgcgatccctcacccgcagctgcctgtatcacaaaagcgaagatcagcttcggcgcacgctggaagacgcggaggctctcttcagtaaatactgcgcgctgactcttaaggactagtttcgcgccctttctcaaatttaagcgcgaaaactacgtcatctccagcggccacacccggcgccagcacctgttgtcagcgccattttttagggcggagtaacttgtatgtgttgggaattgtagttttcttaaaatgggaagtgacgtaacgtgggaaaacggaagtgacgatttgaggaagttgtgggttttttggctttcgtttctgggcgtaggttcgcgtgcggttttctgggtgttttttgtggactttaaccgttacgtcattttttagtcctatatatactcgctctgcacttggcccttttttacactgtgactgattgagctggtgccgtgtcgagtggtgtttttttaataggttttcttttttactggtaaggctgactgttatgactacgtccggcgttccatttggcatgacactacgaccaacacgatctcggttgtctcggcgcactccgtacagtagggatcgtctacctccttttgagacagaaacccgcgctaccatactggaggatcatccgctgctgcccgaatgtaacactttgacaatgcacaacgtgagttacgtgcgaggtcttccctgcagtgtgggatttacgctgattcaggaatgggttgttccctgggatatggttctaacgcgggaggagcttgtaatcctgaggaagtgtatgcacgtgtgcctgtgttgtgccaacattgatatcatgacgagcatgatgatccatggttacgagtcctgggctctccactgtcattgttccagtcccggttccctgcagtgtatagccggcgggcaggttttggccagctggtttaggatggtggtggatggcgccatgtttaatcagaggtttatatggtaccgggaggtggtgaattacaacatgccaaaagaggtaatgtttatgtccagcgtgtttatgaggggtcgccacttaatctacctgcgcttgtggtatgatggccacgtgggttctgtggtccccgccatgagctttggatacagcgccttgcactgtgggattttgaacaatattgtggtgctgtgctgcagttactgtgctgatttaagtgagatcagggtgcgctgctgtgcccggaggacaaggcgccttatgctgcgggcggtgcgaatcatcgctgaggagaccactgccatgttgtattcctgcaggacggagcggcggcggcagcagtttattcgcgcgctgctgcagcaccaccgccctatcctgatgcacgattatgactctacccccatgtaggcgtggacttctccttcgccgcccgttaagcaaccgcaagttggacagcagcctgtggctcagcagctggacagcgacatgaacttaagtgagctgcccggggagtttattaatatcactgatgagcgtttggctcgacaggaaaccgtgtggaatataacacctaagaatatgtctgttacccatgatatgatgctttttaaggccagccggggagaaaggactgtgtactctgtgtgttgggagggaggtggcaggttgaatactagggttctgtgagtttgattaaggtacggtgatctgtataagctatgtggtggtggggctatactactgaatgaaaaatgacttgaaattttctgcaattgaaaaataaacacgttgaaacataacacaaacgattctttattcttgggcaatgtatgaaaaagtgtaagaggatgtggcaaatatttcattaatgtagttgtggccagaccagtcccatgaaaatgacatagagtatgcacttggagttgtgtctcctgtttcctgtgtaccgtttagtgtaatggttagtgttacaggtttagttttgtctccgtttaagtaaacttgactgacaatgttacttttggcagttttaccgtgagattttggataagctgataggttaggcataaatccaacagcgtttgtataggctgtcgcccctcctgacgcggtaggaggaggggagggtgccctgcatgtctgccgctgctcttgctcttgccgctgctgaggaggggggcgcatctgccgcagcaccggatgcatctgggaaaagcaaaaaaggggctcgtccctgtttccggaggaatttgcaagcggggtcttgcatgacggggaggcaaacccccgttcgccgcagtccggccggtccgagactcgaaccgggggtcccgcgactcaacccttggaaaataaccctccggctacagggagcgagccacttaatgctttcgctttccagcctaaccgcttacgctgcgcgcggccagtggccaaaaaagctagcgcagcagccgccgcgcctggaaggaagccaaaaggagcactcccccgttgtctgacgtcgcacacctgggttcgacacgcgggcggtaaccgcatggatcacggcggacggccggatacggggctcgaaccccggtcgtccgccatgatacccttgcgaatttatccaccagaccacggaagagtgcccgcttacaggctctccttttgcacggtctagagcgtcaacgattgcgcgcgcctgaccggccagagcgtcccgaccatggagcactttttgccgctgcgcaacatctggaaccgcgtccgcgactttccgcgcgcctccaccaccgccgccggcatcacctggatgtccaggtacatctacggata

SEQ ID NO: 268 - DNA, 15715 bp, synthetic construct
  source 1..15715: mol_type = other DNA
atgccggggttttacgagattgtgattaaggtccccagcgaccttgacgagcatctgcccggcatttctgacagctttgtgaactgggtggccgagaaggaatgggagttgccgccagattctgacatggatctgaatctgattgagcaggcacccctgaccgtggccgagaagctgcagcgcgactttctgacggaatggcgccgtgtgagtaaggccccggaggctcttttctttgtgcaatttgagaagggagagagctacttccacatgcacgtgctcgtggaaaccaccggggtgaaatccatggttttgggacgtttcctgagtcagattcgcgaaaaactgattcagagaatttaccgcgggatcgagccgactttgccaaactggttcgcggtcacaaagaccagaaatggcgccggaggcgggaacaaggtggtggatgagtgctacatccccaattacttgctccccaaaacccagcctgagctccagtgggcgtggactaatatggaacagtatttaagcgcctgtttgaatctcacggagcgtaaacggttggtggcgcagcatctgacgcacgtgtcgcagacgcaggagcagaacaaagagaatcagaatcccaattctgatgcgccggtgatcagatcaaaaacttcagccaggtacatggagctggtcgggtggctcgtggacaaggggattacctcggagaagcagtggatccaggaggaccaggcctcatacatctccttcaatgcggcctccaactcgcggtcccaaatcaaggctgccttggacaatgcgggaaagattatgagcctgactaaaaccgcccccgactacctggtgggccagcagcccgtggaggacatttccagcaatcggatttataaaattttggaactaaacgggtacgatccccaatatgcggcttccgtctttctgggatgggccacgaaaaagttcggcaagaggaacaccatctggctgtttgggcctgcaactaccgggaagaccaacatcgcggaggccatagcccacactgtgcccttctacgggtgcgtaaactggaccaatgagaactttcccttcaacgactgtgtcgacaagatggtgatctggtgggaggaggggaagatgaccgccaaggtcgtggagtcggccaaagccattctcggaggaagcaaggtgcgcgtggaccagaaatgcaagtcctcggcccagatagacccgactcccgtgatcgtcacctccaacaccaacatgtgcgccgtgattgacgggaactcaacgaccttcgaacaccagcagccgttgcaagaccggatgttcaaatttgaactcacccgccgtctggatcatgactttgggaaggtcaccaagcaggaagtcaaagactttttccggtgggcaaaggatcacgtggttgaggtggagcatgaattctacgtcaaaaagggtggagccaagaaaagacccgcccccagtgacgcagatataagtgagcccaaacgggtgcgcgagtcagttgcgcagccatcgacgtcagacgcggaagcttcgatcaactacgcagacaggtaccaaaacaaatgttctcgtcacgtgggcatgaatctgatgctgtttccctgcagacaatgcgagagaatgaatcagaattcaaatatctgcttcactcacggacagaaagactgtttagagtgctttcccgtgtcagaatctcaacccgtttctgtcgtcaaaaaggcgtatcagaaactgtgctacattcatcatatcatgggaaaggtgccagacgcttgcactgcctgcgatctggtcaatgtggatttggatgactgcatctttgaacaataaatgatttaaatcaggtatggctgccgatggttatcttccagattggctcgaggacaacctctctgagggcattcgcgagtggtgggcgctgaaacctggagccccgaagcccaaagccaaccagcaaaagcaggacgacggccggggtctggtgcttcctggctacaagtacctcggacccttcaacggactcgacaagggggagcccgtcaacgcggcggacgcagcggccctcgagcacgacaaggcctacgaccagcagctgcaggcgggtgacaatccgtacctgcggtataaccacgccgacgccgagtttcaggagcgtctgcaagaagatacgtcttttgggggcaacctcgggcgagcagtcttccaggccaagaagcgggttctcgaacctctcggtctggttgaggaaggcgctaagacggctcctggaaagaagagaccggtagagccatcaccccagcgttctccagactcctctacgggcatcggcaagaaaggccaacagcccgccagaaaaagactcaattttggtcagactggcgactcagagtcagttccagaccctcaacctctcggagaacctccagcagcgccctctggtgtgggacctaatacaatggctgcaggcggtggcgcaccaatggcagacaataacgaaggcgccgacggagtgggtagttcctcgggaaattggcattgcgattccacatggctgggcgacagagtcatcaccaccagcacccgaacctgggccctgcccacctacaacaaccacctctacaagcaaatctccaacgggacatcgggaggagccaccaacgacaacacctacttcggctacagcaccccctgggggtattttgactttaacagattccactgccacttttcaccacgtgactggcagcgactcatcaacaacaactggggattccggcccaagagactcagcttcaagctcttcaacatccaggtcaaggaggtcacgcagaatgaaggcaccaagaccatcgccaataacctcaccagcaccatccaggtgtttacggactcggagtaccagctgccgtacgttctcggctctgcccaccagggctgcctgcctccgttcccggcggacgtgttcatgattccccagtacggctacctaacactcaacaacggtagtcaggccgtgggacgctcctccttctactgcctggaatactttccttcgcagatgctgagaaccggcaacaacttccagtttacttacaccttcgaggacgtgcctttccacagcagctacgcccacagccagagcttggaccggctgatgaatcctctgattgaccagtacctgtactacttgtctcggactcaaacaacaggaggcacggcaaatacgcagactctgggcttcagccaaggtgggcctaatacaatggccaatcaggcaaagaactggctgccaggaccctgttaccgccaacaacgcgtctcaacgacaaccgggcaaaacaacaatagcaactttgcctggactgctgggaccaaataccatctgaatggaagaaattcattggctaatcctggcatcgctatggcaacacacaaagacgacgaggagcgtttttttcccagtaacgggatcctgatttttggcaaacaaaatgctgccagagacaatgcggattacagcgatgtcatgctcaccagcgaggaagaaatcaaaaccactaaccctgtggctacagaggaatacggtatcgtggcagataacttgcagcagcaaaacacggctcctcaaattggaactgtcaacagccagggggccttacccggtatggtctggcagaaccgggacgtgtacctgcagggtcccatctgggccaagattcctcacacggacggcaacttccacccgtctccgctgatgggcggctttggcctgaaacatcctccgcctcagatcctgatcaagaacacgcctgtacctgcggatcctccgaccaccttcaaccagtcaaagctgaactctttcatcacgcaatacagcaccggacaggtcagcgtggaaattgaatgggagctgcagaaggaaaacagcaagcgctggaaccccgagatccagtacacctccaactactacaaatctacaagtgtggactttgctgttaatacagaaggcgtgtactctgaaccccgccccattggcacccgttacctcacccgtaatctgtaattgcctgttaatcaataaaccggttgattcgtttcagttgaactttggtctctgcgaagggcgaattcgtttaaacctgcaggactagagccgaattctgcatcgcgatagggataacagggtaataaataatgtactagagacactttcaataaaggcaaatgcttttatttgtacactctcgggtgattatttacccccacccttgccgtctgcgccgttcagaagtcgaaggggttctgtctggcatcggaatgggccacgggcagagacacgttccggtactggtgcttggtggaccacttgaactcaggcacgaccattctaggcagctctgtgaagttctcgctccacaggctccgcaccatcaccagggcgttcagcaggtcaggggcgctgattttgaagtcgcagttaggtccgccgccctgggctctgctgtttctgtacacagggttgcagcactggaacacaataagagcagggtggtgcacgctggccagcacagacttgtcgctgatcaggtcggcgtcgagatcctcggcgttagacaaggcaaaaggggtcagcttgggcagctggcggcccaggaaaggggcgtggccgggcttgctattgcactcgcatctcagaggcatcagcaggtggccgtggccggtctgggcgttggggtacagggcctgcataaaggccttgatctgtttgaaggccacttgggccttggcgccttcggagaagaacatgccgcagcttttgccgctgaactggttggcggggcaggcggcgtcgtgcacacaacaccgggcgtcggtattgctgatctgcaccacgtttctgccccatctgttcttcacgatcttggccttgctgctctgctctttcagggccctctggccgttctcagaggtgacgtccatctcgatcacatgttccttgttgatcatgatgctgccgtgcagacacttcagctcgccctcgatttccgcgcatctgtgcagccacagggcacaaccggtaggctcgtggtgcttgtatgtcacctcagcaaaagattgcaggtaggcttgcaggaatctgcccatcatggtcacgaaggtcttgttggaggtaaaagtcagctgcagtcctctgtgttcctcgttcagccatgtcttgcacacggcggccagagcctcgacctgatctggcagcagcttgaaattagccttcaggtcgttgtccacgtgatacttatccatcagtgctctggcggcttccatgcccttctcccaggcggaaacgatgggcacgctcagggggttcatcacggtgatctcgctttcagcttctgaaggttcctcctcttcctcctgtgttctcatgccccgagccacggggtcgtcctcattcagtctccgcacggttctttttcctccctttccgtgcttaatcagtacaggaggattagagaagcccaccatctggagggcgacgtcctccctttcttcttcgctatccacgatcacttctgggctggggggccgttcaggctttgggctaggccgtttttttttcttcttaggggcgatagccagatcagcggcgcttgtagagggccgaggactaggggttctaggcacgagggcgtcctggctgctgtcctcctcatcctcgctctcgatccgtctccgcattctcttcttagggggggcccgcggagggggagggctagggctaggggacgacacatcttccatggttggaggtctgcgagcagcgcctctgcctctctctggtgttgtctcgcgctgttcttcctctctagaggccatttccttctcctataggcagaaaaagatcgttgaaactcactccggggctgtggacgtcggcttaccttcgcaaatttgtacctgaggactaccacgcccacgagattaggttctacgaagaccaatcccgcccgcctaatgcggagcttaccgcctgcgtcattacccagggccacattcttggccaattgcaagccatcaacaaagcccgccaagagtttctgctacgaaagggacggggggtttacttggacccccagtccggcgaggagctcaacccaatccccccgccgccgcagccctatcagcagcagccgcgggcccttgcttcccaggatggcacccaaaaagaagctgcagctgccgccgccacccacggacgaggaggaatactgggacagtcaggcagaggaggttttggacgaggaggaggaggacatgatggaagactgggagagcctagacgaggaagcttccgaggtcgaagaggtgtcagacgaaacaccgtcaccctcggtcgcattcccctcgccggcgccccagaaatcggcaaccggttccagcatggctacaacctccgctcctcaggcgccgccggcactgcccgttcgccgacccaaccgtagatgggacaccactggaaccagggccggtaagtccaagcagccgccgccgttagcccaagagcaacaacagcgccaaggctaccgctcatggcgcgggcacaagaacgccatagttgcttgcttgcaagactgtgggggcaacatctccttcgcccgccgctttcttctctaccatcacggcgtggccttcccccgtaacatcctgcattactaccgtcatctctacagcccatactgcaccggcggcagcggcagcaacagcagcggccacacagaagcaaaggcgaccggatagcaagactctgacaaagcccaagaaatccacagcggcggcagcagcaggaggaggagcgctgcgtctggcgcccaacgaacccgtatcgacccgcgagcttagaaacaggatttttcccactctgtatgctatatttcaacagagcaggggccaagaacaagagctgaaaataaaaaacaggtctctgcgatccctcacccgcagctgcctgtatcacaaaagcgaagatcagcttcggcgcacgctggaagacgcggaggctctcttcagtaaatactgcgcgctgactcttaaggactagtttcgcgccctttctcaaatttaagcgcgaaaactacgtcatctccagcggccacacccggcgccagcacctgttgtcagcgccattttttagggcggagtaacttgtatgtgttgggaattgtagttttcttaaaatgggaagtgacgtaacgtgggaaaacggaagtgacgatttgaggaagttgtgggttttttggctttcgtttctgggcgtaggttcgcgtgcggttttctgggtgttttttgtggactttaaccgttacgtcattttttagtcctatatatactcgctctgcacttggcccttttttacactgtgactgattgagctggtgccgtgtcgagtggtgtttttttaataggttttcttttttactggtaaggctgactgttatgactacgtccggcgttccatttggcatgacactacgaccaacacgatctcggttgtctcggcgcactccgtacagtagggatcgtctacctccttttgagacagaaacccgcgctaccatactggaggatcatccgctgctgcccgaatgtaacactttgacaatgcacaacgtgagttacgtgcgaggtcttccctgcagtgtgggatttacgctgattcaggaatgggttgttccctgggatatggttctaacgcgggaggagcttgtaatcctgaggaagtgtatgcacgtgtgcctgtgttgtgccaacattgatatcatgacgagcatgatgatccatggttacgagtcctgggctctccactgtcattgttccagtcccggttccctgcagtgtatagccggcgggcaggttttggccagctggtttaggatggtggtggatggcgccatgtttaatcagaggtttatatggtaccgggaggtggtgaattacaacatgccaaaagaggtaatgtttatgtccagcgtgtttatgaggggtcgccacttaatctacctgcgcttgtggtatgatggccacgtgggttctgtggtccccgccatgagctttggatacagcgccttgcactgtgggattttgaacaatattgtggtgctgtgctgcagttactgtgctgatttaagtgagatcagggtgcgctgctgtgcccggaggacaaggcgccttatgctgcgggcggtgcgaatcatcgctgaggagaccactgccatgttgtattcctgcaggacggagcggcggcggcagcagtttattcgcgcgctgctgcagcaccaccgccctatcctgatgcacgattatgactctacccccatgtaggcgtggacttctccttcgccgcccgttaagcaaccgcaagttggacagcagcctgtggctcagcagctggacagcgacatgaacttaagtgagctgcccggggagtttattaatatcactgatgagcgtttggctcgacaggaaaccgtgtggaatataacacctaagaatatgtctgttacccatgatatgatgctttttaaggccagccggggagaaaggactgtgtactctgtgtgttgggagggaggtggcaggttgaatactagggttctgtgagtttgattaaggtacggtgatctgtataagctatgtggtggtggggctatactactgaatgaaaaatgacttgaaattttctgcaattgaaaaataaacacgttgaaacataacacaaacgattctttattcttgggcaatgtatgaaaaagtgtaagaggatgtggcaaatatttcattaatgtagttgtggccagaccagtcccatgaaaatgacatagagtatgcacttggagttgtgtctcctgtttcctgtgtaccgtttagtgtaatggttagtgttacaggtttagttttgtctccgtttaagtaaacttgactgacaatgttacttttggcagttttaccgtgagattttggataagctgataggttaggcataaatccaacagcgtttgtataggctgtcgcccctcctgacgcggtaggaggaggggagggtgccctgcatgtctgccgctgctcttgctcttgccgctgctgaggaggggggcgcatctgccgcagcaccggatgcatctgggaaaagcaaaaaaggggctcgtccctgtttccggaggaatttgcaagcggggtcttgcatgacggggaggcaaacccccgttcgccgcagtccggccggtccgagactcgaaccgggggtcccgcgactcaacccttggaaaataaccctccggctacagggagcgagccacttaatgctttcgctttccagcctaaccgcttacgctgcgcgcggccagtggccaaaaaagctagcgcagcagccgccgcgcctggaaggaagccaaaaggagcactcccccgttgtctgacgtcgcacacctgggttcgacacgcgggcggtaaccgcatggatcacggcggacggccggatacggggctcgaaccccggtcgtccgccatgatacccttgcgaatttatccaccagaccacggaagagtgcccgcttacaggctctccttttgcacggtctagagcgtcaacgattgcgcgcgcctgaccggccagagcgtcccgaccatggagcactttttgccgctgcgcaacatctggaaccgcgtccgcgactttccgcgcgcctccaccaccgccgccggcatcacctggatgtccaggtacatctacggatatggcaaacagctattatgggtattatgggtgcggccgcggatcccgggcccgtcgactgcagaggcctgcatgcaagcttggtgtaatcatggtcatagctgtttcctgtgtgaaattgttatccgctcacaattccacacaacatacgagccggaagcataaagtgtaaagcctggggtgcctaatgagtgagctaactcacattaattgcgttgcgctcactgcccgctttccagtcgggaaacctgtcgtgccagctgcattaatgaatcggccaacgcgcggggagaggcggtttgcgtattgggcgctcttccgcttcctcgctcactgactcgctgcgctcggtcgttcggctgcggcgagcggtatcagctcactcaaaggcggtaatacggttatccacagaatcaggggataacgcaggaaagaacatgtgagcaaaaggccagcaaaaggccaggaaccgtaaaaaggccgcgttgctggcgtttttccataggctccgcccccctgacgagcatcacaaaaatcgacgctcaagtcagaggtggcgaaacccgacaggactataaagataccaggcgtttccccctggaagctccctcgtgcgctctcctgttccgaccctgccgcttaccggatacctgtccgcctttctcccttcgggaagcgtggcgctttctcatagctcacgctgtaggtatctcagttcggtgtaggtcgttcgctccaagctgggctgtgtgcacgaaccccccgttcagcccgaccgctgcgccttatccggtaactatcgtcttgagtccaacccggtaagacacgacttatcgccactggcagcagccactggtaacaggattagcagagcgaggtatgtaggcggtgctacagagttcttgaagtggtggcctaactacggctacactagaagaacagtatttggtatctgcgctctgctgaagccagttaccttcggaaaaagagttggtagctcttgatccggcaaacaaaccaccgctggtagcggtggtttttttgtttgcaagcagcagattacgcgcagaaaaaaaggatctcaagaagatcctttgatcttttctacggggtctgacgctcagtggaacgaaaactttaattaaggccttaattaggctgcgcgctcgctcgctcactgaggccgcccgggcaaagcccgggcgtcgggcgacctttggtcgcccggcctcagtgagcgagcgagcgcgcagagagggagtggccaactccatcactaggggttcctcatatgcagggtaatggggatcctctagaggccgtccgccctcggcaccatcctcacgacacccaaatatggcgacgggtgaggaatggtggggagttatttttagagcggtgaggaaggtgggcaggcagcaggtgttgggggagttatttttagagcggggagttatttttagagcggaggaatggtggacacccaaatatggcgacggttcctcacggacacccaaatatggcgacgggccctcggccggggccgcattcctgggggccgggcggtgctcccgcccgcctcgataaaaggctccggggccggcggcggcccacgagctacccggaggagcgggaggcgccaagcggaattcgccaccatgctttggtgggaagaggtggaagattgctatgagagggaagatgtgcagaagaaaaccttcaccaaatgggtcaatgcccagttcagcaagtttggcaagcagcacattgagaacctgttcagtgacctgcaggatggcagaaggctgctggatctgctggaaggcctgacaggccagaagctgcctaaagagaagggcagcacaagagtgcatgccctgaacaatgtgaacaaggccctgagagtgctgcagaacaacaatgtggacctggtcaatattggcagcacagacattgtggatggcaaccacaagctgaccctgggcctgatctggaacatcatcctgcactggcaagtgaagaatgtgatgaagaacatcatggctggcctgcagcagaccaactctgagaagatcctgctgagctgggtcagacagagcaccagaaactaccctcaagtgaatgtgatcaacttcaccacctcttggagtgatggactggccctgaatgccctgatccacagccacagacctgacctgtttgactggaactctgttgtgtgccagcagtctgccacacagagactggaacatgccttcaacattgccagataccagctgggaattgagaaactgctggaccctgaggatgtggacaccacctatcctgacaagaaatccatcctcatgtacatcaccagcctgttccaggtgctgccccagcaagtgtccattgaggccattcaagaggttgagatgctgcccagacctcctaaagtgaccaaagaggaacacttccagctgcaccaccagatgcactactctcagcagatcacagtgtctctggcccagggatatgagagaacaagcagccccaagcctaggttcaagagctatgcctacacacaggctgcctatgtgaccacatctgaccccacaagaagcccatttccaagccagcatctggaagcccctgaggacaagagctttggcagcagcctgatggaatctgaagtgaacctggatagataccagacagccctggaagaagtgctgtcctggctgctgtctgctgaggatacactgcaggctcagggtgaaatcagcaatgatgtggaagtggtcaaggaccagtttcacacccatgagggctacatgatggacctgacagcccaccagggcagagtgggaaatatcctgcagctgggctccaagctgattggcacaggcaagctgtctgaggatgaagagacagaggtgcaagagcagatgaacctgctgaacagcagatgggagtgtctgagagtggccagcatggaaaagcagagcaacctgcacagagtgctcatggacctgcagaatcagaaactgaaagaactgaatgactggctgaccaagacagaagaaaggactaggaagatggaagaggaacctctgggaccagacctggaagatctgaaaagacaggtgcagcagcataaggtgctgcaagaggaccttgagcaagagcaagtcagagtgaacagcctgacacacatggtggtggttgtggatgagtcctctggggatcatgccacagctgctctggaagaacagctgaaggtgctgggagacagatgggccaacatctgtaggtggacagaggatagatgggtgctgctccaggacattctgctgaagtggcagagactgacagaggaacagtgcctgttttctgcctggctctctgagaaagaggatgctgtcaacaagatccataccacaggcttcaaggatcagaatgagatgctcagctccctgcagaaactggctgtgctgaaggctgacctggaaaagaaaaagcagtccatgggcaagctctacagcctgaagcaggacctgctgtctaccctgaagaacaagtctgtgacccagaaaactgaggcctggctggacaactttgctagatgctgggacaacctggtgcagaagctggaaaagtctacagcccagatcagccagcaacctgatcttgcccctggcctgaccacaattggagcctctccaacacagactgtgaccctggttacccagccagtggtcaccaaagagacagccatcagcaaactggaaatgcccagctctctgatgctggaagtccccacactggaaaggctgcaagaacttcaagaggccacagatgagctggacctgaagctgagacaggctgaagtgatcaaaggcagctggcagccagttggggacctgctcattgatagcctgcaggaccatctggaaaaagtgaaagccctgaggggagagattgcccctctgaaagaaaatgtgtcccatgtgaatgacctggccagacagctgaccacactgggaatccagctgagcccctacaacctgagcacccttgaggacctgaacaccaggtggaagctcctccaggtggcagtggaagatagagtcaggcagctgcatgaggcccacagagattttggaccagccagccagcactttctgtctacctctgtgcaaggcccctgggagagagctatctctcctaacaaggtgccctactacatcaaccatgagacacagaccacctgttgggatcaccccaagatgacagagctgtaccagagtctggcagacctcaacaatgtcagattcagtgcctacaggactgccatgaagctcagaaggctccagaaagctctgtgcctggacctgctttccctgagtgcagcttgtgatgccctggaccagcacaatctgaagcagaatgaccagcctatggacatcctccagatcatcaactgcctcaccaccatctatgataggctggaacaagagcacaacaatctggtcaatgtgcccctgtgtgtggacatgtgcctgaattggctgctgaatgtgtatgacacaggcagaacaggcaggatcagagtcctgtccttcaagacaggcatcatctccctgtgcaaagcccacttggaggacaagtacagatacctgttcaagcaagtggcctccagcacaggcttttgtgaccagagaaggctgggcctgctcctgcatgacagcattcagatccctagacagctgggagaagtggcttcctttggaggcagcaatattgagccatcagtcaggtcctgttttcagtttgccaacaacaagcctgagattgaggctgccctgttcctggactggatgagacttgagcctcagagcatggtctggctgcctgtgcttcatagagtggctgctgctgagactgccaagcaccaggccaagtgcaacatctgcaaagagtgccccatcattggcttcagatacagatccctgaagcacttcaactatgatatctgccagagctgcttctttagtggcagggttgccaagggccacaaaatgcactaccccatggtggaatactgcaccccaacaacctctggggaagatgttagagactttgccaaggtgctgaaaaacaagttcaggaccaagagatactttgctaagcaccccagaatgggctacctgcctgtccagacagtgcttgagggtgacaacatggaaacccctgtgacactgatcaatttctggccagtggactctgcccctgcctcaagtccacagctgtcccatgatgacacccacagcagaattgagcactatgcctccagactggcagagatggaaaacagcaatggcagctacctgaatgatagcatcagccccaatgagagcattgatgatgagcatctgctgatccagcactactgtcagtccctgaaccaggactctccactgagccagcctagaagccctgctcagatcctgatcagccttgagtctgaggaaaggggagagctggaaagaatcctggcagatcttgaggaagagaacagaaacctgcaggcagagtatgacaggctcaaacagcagcatgagcacaagggactgagccctctgccttctcctcctgaaatgatgcccacctctccacagtctccaaggtgatgactcgagaggcctaataaagagctcagatgcatcgatcagagtgtgttggttttttgtgtgccagggtaatgggctagctgcggccgcaggaacccctagtgatggagttggccactccctctctgcgcgctcgctcgctcactgaggccgggcgaccaaaggtcgcccgacgcccgggctttgcccgggcggcctcagtgagcgagcgagcgcgcag

SEQ ID NO: 269 - DNA, 17353 bp, synthetic construct
  source 1..17353: mol_type = other DNA
tcgcgcgtttcggtgatgacggtgaaaacctctgacacatgcagctcccggagacggtcacagcttgtctgtaagcggatgccgggagcagacaagcccgtcagggcgcgtcagcgggtgttggcgggtgtcggggctggcttaactatgcggcatcagagcagattgtactgagagtgcaccatatgcggtgtgaaataccgcacagatgcgtaaggagaaaataccgcatcaggcgccattcgccattcaggctgcgcaactgttgggaagggcgatcggtgcgggcctcttcgctattacgccagctggcgaaagggggatgtgctgcaaggcgattaagttgggtaacgccagggttttcccagtcacgacgttgtaaaacgacggccagagaattccgcagggtctccattttgaagcgggaggtttgaacgcgcagccgccatgccggggttttacgagattgtgattaaggtccccagcgaccttgacgagcatctgcccggcatttctgacagctttgtgaactgggtggccgagaaggaatgggagttgccgccagattctgacatggatctgaatctgattgagcaggcacccctgaccgtggccgagaagctgcagcgcgactttctgacggaatggcgccgtgtgagtaaggccccggaggctcttttctttgtgcaatttgagaagggagagagctacttccacatgcacgtgctcgtggaaaccaccggggtgaaatccatggttttgggacgtttcctgagtcagattcgcgaaaaactgattcagagaatttaccgcgggatcgagccgactttgccaaactggttcgcggtcacaaagaccagaaatggcgccggaggcgggaacaaggtggtggatgagtgctacatccccaattacttgctccccaaaacccagcctgagctccagtgggcgtggactaatatggaacagtatttaagcgcctgtttgaatctcacggagcgtaaacggttggtggcgcagcatctgacgcacgtgtcgcagacgcaggagcagaacaaagagaatcagaatcccaattctgatgcgccggtgatcagatcaaaaacttcagccaggtacatggagctggtcgggtggctcgtggacaaggggattacctcggagaagcagtggatccaggaggaccaggcctcatacatctccttcaatgcggcctccaactcgcggtcccaaatcaaggctgccttggacaatgcgggaaagattatgagcctgactaaaaccgcccccgactacctggtgggccagcagcccgtggaggacatttccagcaatcggatttataaaattttggaactaaacgggtacgatccccaatatgcggcttccgtctttctgggatgggccacgaaaaagttcggcaagaggaacaccatctggctgtttgggcctgcaactaccgggaagaccaacatcgcggaggccatagcccacactgtgcccttctacgggtgcgtaaactggaccaatgagaactttcccttcaacgactgtgtcgacaagatggtgatctggtgggaggaggggaagatgaccgccaaggtcgtggagtcggccaaagccattctcggaggaagcaaggtgcgcgtggaccagaaatgcaagtcctcggcccagatagacccgactcccgtgatcgtcacctccaacaccaacatgtgcgccgtgattgacgggaactcaacgaccttcgaacaccagcagccgttgcaagaccggatgttcaaatttgaactcacccgccgtctggatcatgactttgggaaggtcaccaagcaggaagtcaaagactttttccggtgggcaaaggatcacgtggttgaggtggagcatgaattctacgtcaaaaagggtggagccaagaaaagacccgcccccagtgacgcagatataagtgagcccaaacgggtgcgcgagtcagttgcgcagccatcgacgtcagacgcggaagcttcgatcaactacgcagacaggtaccaaaacaaatgttctcgtcacgtgggcatgaatctgatgctgtttccctgcagacaatgcgagagaatgaatcagaattcaaatatctgcttcactcacggacagaaagactgtttagagtgctttcccgtgtcagaatctcaacccgtttctgtcgtcaaaaaggcgtatcagaaactgtgctacattcatcatatcatgggaaaggtgccagacgcttgcactgcctgcgatctggtcaatgtggatttggatgactgcatctttgaacaataaatgatttaaatcaggtatggctgccgatggttatcttccagattggctcgaggacaacctctctgagggcattcgcgagtggtgggcgctgaaacctggagccccgaagcccaaagccaaccagcaaaagcaggacgacggccggggtctggtgcttcctggctacaagtacctcggacccttcaacggactcgacaagggggagcccgtcaacgcggcggacgcagcggccctcgagcacgacaaggcctacgaccagcagctgcaggcgggtgacaatccgtacctgcggtataaccacgccgacgccgagtttcaggagcgtctgcaagaagatacgtcttttgggggcaacctcgggcgagcagtcttccaggccaagaagcgggttctcgaacctctcggtctggttgaggaaggcgctaagacggctcctggaaagaagagaccggtagagccatcaccccagcgttctccagactcctctacgggcatcggcaagaaaggccaacagcccgccagaaaaagactcaattttggtcagactggcgactcagagtcagttccagaccctcaacctctcggagaacctccagcagcgccctctggtgtgggacctaatacaatggctgcaggcggtggcgcaccaatggcagacaataacgaaggcgccgacggagtgggtagttcctcgggaaattggcattgcgattccacatggctgggcgacagagtcatcaccaccagcacccgaacctgggccctgcccacctacaacaaccacctctacaagcaaatctccaacgggacatcgggaggagccaccaacgacaacacctacttcggctacagcaccccctgggggtattttgactttaacagattccactgccacttttcaccacgtgactggcagcgactcatcaacaacaactggggattccggcccaagagactcagcttcaagctcttcaacatccaggtcaaggaggtcacgcagaatgaaggcaccaagaccatcgccaataacctcaccagcaccatccaggtgtttacggactcggagtaccagctgccgtacgttctcggctctgcccaccagggctgcctgcctccgttcccggcggacgtgttcatgattccccagtacggctacctaacactcaacaacggtagtcaggccgtgggacgctcctccttctactgcctggaatactttccttcgcagatgctgagaaccggcaacaacttccagtttacttacaccttcgaggacgtgcctttccacagcagctacgcccacagccagagcttggaccggctgatgaatcctctgattgaccagtacctgtactacttgtctcggactcaaacaacaggaggcacggcaaatacgcagactctgggcttcagccaaggtgggcctaatacaatggccaatcaggcaaagaactggctgccaggaccctgttaccgccaacaacgcgtctcaacgacaaccgggcaaaacaacaatagcaactttgcctggactgctgggaccaaataccatctgaatggaagaaattcattggctaatcctggcatcgctatggcaacacacaaagacgacgaggagcgtttttttcccagtaacgggatcctgatttttggcaaacaaaatgctgccagagacaatgcggattacagcgatgtcatgctcaccagcgaggaagaaatcaaaaccactaaccctgtggctacagaggaatacggtatcgtggcagataacttgcagcagcaaaacacggctcctcaaattggaactgtcaacagccagggggccttacccggtatggtctggcagaaccgggacgtgtacctgcagggtcccatctgggccaagattcctcacacggacggcaacttccacccgtctccgctgatgggcggctttggcctgaaacatcctccgcctcagatcctgatcaagaacacgcctgtacctgcggatcctccgaccaccttcaaccagtcaaagctgaactctttcatcacgcaatacagcaccggacaggtcagcgtggaaattgaatgggagctgcagaaggaaaacagcaagcgctggaaccccgagatccagtacacctccaactactacaaatctacaagtgtggactttgctgttaatacagaaggcgtgtactctgaaccccgccccattggcacccgttacctcacccgtaatctgtaattgcctgttaatcaataaaccggttgattcgtttcagttgaactttggtctctgcgaagggcgaattcgtttaaacctgcaggactagagccgaattctgcattaattaaggccttaattaggctgcgcgctcgctcgctcactgaggccgcccgggcaaagcccgggcgtcgggcgacctttggtcgcccggcctcagtgagcgagcgagcgcgcagagagggagtggccaactccatcactaggggttcctcatatgcagggtaatggggatcctctagaggccgtccgccctcggcaccatcctcacgacacccaaatatggcgacgggtgaggaatggtggggagttatttttagagcggtgaggaaggtgggcaggcagcaggtgttgggggagttatttttagagcggggagttatttttagagcggaggaatggtggacacccaaatatggcgacggttcctcacggacacccaaatatggcgacgggccctcggccggggccgcattcctgggggccgggcggtgctcccgcccgcctcgataaaaggctccggggccggcggcggcccacgagctacccggaggagcgggaggcgccaagcggaattcgccaccatgctttggtgggaagaggtggaagattgctatgagagggaagatgtgcagaagaaaaccttcaccaaatgggtcaatgcccagttcagcaagtttggcaagcagcacattgagaacctgttcagtgacctgcaggatggcagaaggctgctggatctgctggaaggcctgacaggccagaagctgcctaaagagaagggcagcacaagagtgcatgccctgaacaatgtgaacaaggccctgagagtgctgcagaacaacaatgtggacctggtcaatattggcagcacagacattgtggatggcaaccacaagctgaccctgggcctgatctggaacatcatcctgcactggcaagtgaagaatgtgatgaagaacatcatggctggcctgcagcagaccaactctgagaagatcctgctgagctgggtcagacagagcaccagaaactaccctcaagtgaatgtgatcaacttcaccacctcttggagtgatggactggccctgaatgccctgatccacagccacagacctgacctgtttgactggaactctgttgtgtgccagcagtctgccacacagagactggaacatgccttcaacattgccagataccagctgggaattgagaaactgctggaccctgaggatgtggacaccacctatcctgacaagaaatccatcctcatgtacatcaccagcctgttccaggtgctgccccagcaagtgtccattgaggccattcaagaggttgagatgctgcccagacctcctaaagtgaccaaagaggaacacttccagctgcaccaccagatgcactactctcagcagatcacagtgtctctggcccagggatatgagagaacaagcagccccaagcctaggttcaagagctatgcctacacacaggctgcctatgtgaccacatctgaccccacaagaagcccatttccaagccagcatctggaagcccctgaggacaagagctttggcagcagcctgatggaatctgaagtgaacctggatagataccagacagccctggaagaagtgctgtcctggctgctgtctgctgaggatacactgcaggctcagggtgaaatcagcaatgatgtggaagtggtcaaggaccagtttcacacccatgagggctacatgatggacctgacagcccaccagggcagagtgggaaatatcctgcagctgggctccaagctgattggcacaggcaagctgtctgaggatgaagagacagaggtgcaagagcagatgaacctgctgaacagcagatgggagtgtctgagagtggccagcatggaaaagcagagcaacctgcacagagtgctcatggacctgcagaatcagaaactgaaagaactgaatgactggctgaccaagacagaagaaaggactaggaagatggaagaggaacctctgggaccagacctggaagatctgaaaagacaggtgcagcagcataaggtgctgcaagaggaccttgagcaagagcaagtcagagtgaacagcctgacacacatggtggtggttgtggatgagtcctctggggatcatgccacagctgctctggaagaacagctgaaggtgctgggagacagatgggccaacatctgtaggtggacagaggatagatgggtgctgctccaggacattctgctgaagtggcagagactgacagaggaacagtgcctgttttctgcctggctctctgagaaagaggatgctgtcaacaagatccataccacaggcttcaaggatcagaatgagatgctcagctccctgcagaaactggctgtgctgaaggctgacctggaaaagaaaaagcagtccatgggcaagctctacagcctgaagcaggacctgctgtctaccctgaagaacaagtctgtgacccagaaaactgaggcctggctggacaactttgctagatgctgggacaacctggtgcagaagctggaaaagtctacagcccagatcagccagcaacctgatcttgcccctggcctgaccacaattggagcctctccaacacagactgtgaccctggttacccagccagtggtcaccaaagagacagccatcagcaaactggaaatgcccagctctctgatgctggaagtccccacactggaaaggctgcaagaacttcaagaggccacagatgagctggacctgaagctgagacaggctgaagtgatcaaaggcagctggcagccagttggggacctgctcattgatagcctgcaggaccatctggaaaaagtgaaagccctgaggggagagattgcccctctgaaagaaaatgtgtcccatgtgaatgacctggccagacagctgaccacactgggaatccagctgagcccctacaacctgagcacccttgaggacctgaacaccaggtggaagctcctccaggtggcagtggaagatagagtcaggcagctgcatgaggcccacagagattttggaccagccagccagcactttctgtctacctctgtgcaaggcccctgggagagagctatctctcctaacaaggtgccctactacatcaaccatgagacacagaccacctgttgggatcaccccaagatgacagagctgtaccagagtctggcagacctcaacaatgtcagattcagtgcctacaggactgccatgaagctcagaaggctccagaaagctctgtgcctggacctgctttccctgagtgcagcttgtgatgccctggaccagcacaatctgaagcagaatgaccagcctatggacatcctccagatcatcaactgcctcaccaccatctatgataggctggaacaagagcacaacaatctggtcaatgtgcccctgtgtgtggacatgtgcctgaattggctgctgaatgtgtatgacacaggcagaacaggcaggatcagagtcctgtccttcaagacaggcatcatctccctgtgcaaagcccacttggaggacaagtacagatacctgttcaagcaagtggcctccagcacaggcttttgtgaccagagaaggctgggcctgctcctgcatgacagcattcagatccctagacagctgggagaagtggcttcctttggaggcagcaatattgagccatcagtcaggtcctgttttcagtttgccaacaacaagcctgagattgaggctgccctgttcctggactggatgagacttgagcctcagagcatggtctggctgcctgtgcttcatagagtggctgctgctgagactgccaagcaccaggccaagtgcaacatctgcaaagagtgccccatcattggcttcagatacagatccctgaagcacttcaactatgatatctgccagagctgcttctttagtggcagggttgccaagggccacaaaatgcactaccccatggtggaatactgcaccccaacaacctctggggaagatgttagagactttgccaaggtgctgaaaaacaagttcaggaccaagagatactttgctaagcaccccagaatgggctacctgcctgtccagacagtgcttgagggtgacaacatggaaacccctgtgacactgatcaatttctggccagtggactctgcccctgcctcaagtccacagctgtcccatgatgacacccacagcagaattgagcactatgcctccagactggcagagatggaaaacagcaatggcagctacctgaatgatagcatcagccccaatgagagcattgatgatgagcatctgctgatccagcactactgtcagtccctgaaccaggactctccactgagccagcctagaagccctgctcagatcctgatcagccttgagtctgaggaaaggggagagctggaaagaatcctggcagatcttgaggaagagaacagaaacctgcaggcagagtatgacaggctcaaacagcagcatgagcacaagggactgagccctctgccttctcctcctgaaatgatgcccacctctccacagtctccaaggtgatgactcgagaggcctaataaagagctcagatgcatcgatcagagtgtgttggttttttgtgtgccagggtaatgggctagctgcggccgcaggaacccctagtgatggagttggccactccctctctgcgcgctcgctcgctcactgaggccgggcgaccaaaggtcgcccgacgcccgggctttgcccgggcggcctcagtgagcgagcgagcgcgcagccttaattaatcgcgatagggataacagggtaataaataatgtactagagacactttcaataaaggcaaatgcttttatttgtacactctcgggtgattatttacccccacccttgccgtctgcgccgttcagaagtcgaaggggttctgtctggcatcggaatgggccacgggcagagacacgttccggtactggtgcttggtggaccacttgaactcaggcacgaccattctaggcagctctgtgaagttctcgctccacaggctccgcaccatcaccagggcgttcagcaggtcaggggcgctgattttgaagtcgcagttaggtccgccgccctgggctctgctgtttctgtacacagggttgcagcactggaacacaataagagcagggtggtgcacgctggccagcacagacttgtcgctgatcaggtcggcgtcgagatcctcggcgttagacaaggcaaaaggggtcagcttgggcagctggcggcccaggaaaggggcgtggccgggcttgctattgcactcgcatctcagaggcatcagcaggtggccgtggccggtctgggcgttggggtacagggcctgcataaaggccttgatctgtttgaaggccacttgggccttggcgccttcggagaagaacatgccgcagcttttgccgctgaactggttggcggggcaggcggcgtcgtgcacacaacaccgggcgtcggtattgctgatctgcaccacgtttctgccccatctgttcttcacgatcttggccttgctgctctgctctttcagggccctctggccgttctcagaggtgacgtccatctcgatcacatgttccttgttgatcatgatgctgccgtgcagacacttcagctcgccctcgatttccgcgcatctgtgcagccacagggcacaaccggtaggctcgtggtgcttgtatgtcacctcagcaaaagattgcaggtaggcttgcaggaatctgcccatcatggtcacgaaggtcttgttggaggtaaaagtcagctgcagtcctctgtgttcctcgttcagccatgtcttgcacacggcggccagagcctcgacctgatctggcagcagcttgaaattagccttcaggtcgttgtccacgtgatacttatccatcagtgctctggcggcttccatgcccttctcccaggcggaaacgatgggcacgctcagggggttcatcacggtgatctcgctttcagcttctgaaggttcctcctcttcctcctgtgttctcatgccccgagccacggggtcgtcctcattcagtctccgcacggttctttttcctccctttccgtgcttaatcagtacaggaggattagagaagcccaccatctggagggcgacgtcctccctttcttcttcgctatccacgatcacttctgggctggggggccgttcaggctttgggctaggccgtttttttttcttcttaggggcgatagccagatcagcggcgcttgtagagggccgaggactaggggttctaggcacgagggcgtcctggctgctgtcctcctcatcctcgctctcgatccgtctccgcattctcttcttagggggggcccgcggagggggagggctagggctaggggacgacacatcttccatggttggaggtctgcgagcagcgcctctgcctctctctggtgttgtctcgcgctgttcttcctctctagaggccatttccttctcctataggcagaaaaagatcgttgaaactcactccggggctgtggacgtcggcttaccttcgcaaatttgtacctgaggactaccacgcccacgagattaggttctacgaagaccaatcccgcccgcctaatgcggagcttaccgcctgcgtcattacccagggccacattcttggccaattgcaagccatcaacaaagcccgccaagagtttctgctacgaaagggacggggggtttacttggacccccagtccggcgaggagctcaacccaatccccccgccgccgcagccctatcagcagcagccgcgggcccttgcttcccaggatggcacccaaaaagaagctgcagctgccgccgccacccacggacgaggaggaatactgggacagtcaggcagaggaggttttggacgaggaggaggaggacatgatggaagactgggagagcctagacgaggaagcttccgaggtcgaagaggtgtcagacgaaacaccgtcaccctcggtcgcattcccctcgccggcgccccagaaatcggcaaccggttccagcatggctacaacctccgctcctcaggcgccgccggcactgcccgttcgccgacccaaccgtagatgggacaccactggaaccagggccggtaagtccaagcagccgccgccgttagcccaagagcaacaacagcgccaaggctaccgctcatggcgcgggcacaagaacgccatagttgcttgcttgcaagactgtgggggcaacatctccttcgcccgccgctttcttctctaccatcacggcgtggccttcccccgtaacatcctgcattactaccgtcatctctacagcccatactgcaccggcggcagcggcagcaacagcagcggccacacagaagcaaaggcgaccggatagcaagactctgacaaagcccaagaaatccacagcggcggcagcagcaggaggaggagcgctgcgtctggcgcccaacgaacccgtatcgacccgcgagcttagaaacaggatttttcccactctgtatgctatatttcaacagagcaggggccaagaacaagagctgaaaataaaaaacaggtctctgcgatccctcacccgcagctgcctgtatcacaaaagcgaagatcagcttcggcgcacgctggaagacgcggaggctctcttcagtaaatactgcgcgctgactcttaaggactagtttcgcgccctttctcaaatttaagcgcgaaaactacgtcatctccagcggccacacccggcgccagcacctgttgtcagcgccattttttagggcggagtaacttgtatgtgttgggaattgtagttttcttaaaatgggaagtgacgtaacgtgggaaaacggaagtgacgatttgaggaagttgtgggttttttggctttcgtttctgggcgtaggttcgcgtgcggttttctgggtgttttttgtggactttaaccgttacgtcattttttagtcctatatatactcgctctgcacttggcccttttttacactgtgactgattgagctggtgccgtgtcgagtggtgtttttttaataggttttcttttttactggtaaggctgactgttatgactacgtccggcgttccatttggcatgacactacgaccaacacgatctcggttgtctcggcgcactccgtacagtagggatcgtctacctccttttgagacagaaacccgcgctaccatactggaggatcatccgctgctgcccgaatgtaacactttgacaatgcacaacgtgagttacgtgcgaggtcttccctgcagtgtgggatttacgctgattcaggaatgggttgttccctgggatatggttctaacgcgggaggagcttgtaatcctgaggaagtgtatgcacgtgtgcctgtgttgtgccaacattgatatcatgacgagcatgatgatccatggttacgagtcctgggctctccactgtcattgttccagtcccggttccctgcagtgtatagccggcgggcaggttttggccagctggtttaggatggtggtggatggcgccatgtttaatcagaggtttatatggtaccgggaggtggtgaattacaacatgccaaaagaggtaatgtttatgtccagcgtgtttatgaggggtcgccacttaatctacctgcgcttgtggtatgatggccacgtgggttctgtggtccccgccatgagctttggatacagcgccttgcactgtgggattttgaacaatattgtggtgctgtgctgcagttactgtgctgatttaagtgagatcagggtgcgctgctgtgcccggaggacaaggcgccttatgctgcgggcggtgcgaatcatcgctgaggagaccactgccatgttgtattcctgcaggacggagcggcggcggcagcagtttattcgcgcgctgctgcagcaccaccgccctatcctgatgcacgattatgactctacccccatgtaggcgtggacttctccttcgccgcccgttaagcaaccgcaagttggacagcagcctgtggctcagcagctggacagcgacatgaacttaagtgagctgcccggggagtttattaatatcactgatgagcgtttggctcgacaggaaaccgtgtggaatataacacctaagaatatgtctgttacccatgatatgatgctttttaaggccagccggggagaaaggactgtgtactctgtgtgttgggagggaggtggcaggttgaatactagggttctgtgagtttgattaaggtacggtgatctgtataagctatgtggtggtggggctatactactgaatgaaaaatgacttgaaattttctgcaattgaaaaataaacacgttgaaacataacacaaacgattctttattcttgggcaatgtatgaaaaagtgtaagaggatgtggcaaatatttcattaatgtagttgtggccagaccagtcccatgaaaatgacatagagtatgcacttggagttgtgtctcctgtttcctgtgtaccgtttagtgtaatggttagtgttacaggtttagttttgtctccgtttaagtaaacttgactgacaatgttacttttggcagttttaccgtgagattttggataagctgataggttaggcataaatccaacagcgtttgtataggctgtcgcccctcctgacgcggtaggaggaggggagggtgccctgcatgtctgccgctgctcttgctcttgccgctgctgaggaggggggcgcatctgccgcagcaccggatgcatctgggaaaagcaaaaaaggggctcgtccctgtttccggaggaatttgcaagcggggtcttgcatgacggggaggcaaacccccgttcgccgcagtccggccggtccgagactcgaaccgggggtcccgcgactcaacccttggaaaataaccctccggctacagggagcgagccacttaatgctttcgctttccagcctaaccgcttacgctgcgcgcggccagtggccaaaaaagctagcgcagcagccgccgcgcctggaaggaagccaaaaggagcactcccccgttgtctgacgtcgcacacctgggttcgacacgcgggcggtaaccgcatggatcacggcggacggccggatacggggctcgaaccccggtcgtccgccatgatacccttgcgaatttatccaccagaccacggaagagtgcccgcttacaggctctccttttgcacggtctagagcgtcaacgattgcgcgcgcctgaccggccagagcgtcccgaccatggagcactttttgccgctgcgcaacatctggaaccgcgtccgcgactttccgcgcgcctccaccaccgccgccggcatcacctggatgtccaggtacatctacggatatggcaaacagctattatgggtattatgggtgcggccgcggatcccgggcccgtcgactgcagaggcctgcatgcaagcttggtgtaatcatggtcatagctgtttcctgtgtgaaattgttatccgctcacaattccacacaacatacgagccggaagcataaagtgtaaagcctggggtgcctaatgagtgagctaactcacattaattgcgttgcgctcactgcccgctttccagtcgggaaacctgtcgtgccagctgcattaatgaatcggccaacgcgcggggagaggcggtttgcgtattgggcgctcttccgcttcctcgctcactgactcgctgcgctcggtcgttcggctgcggcgagcggtatcagctcactcaaaggcggtaatacggttatccacagaatcaggggataacgcaggaaagaacatgtgagcaaaaggccagcaaaaggccaggaaccgtaaaaaggccgcgttgctggcgtttttccataggctccgcccccctgacgagcatcacaaaaatcgacgctcaagtcagaggtggcgaaacccgacaggactataaagataccaggcgtttccccctggaagctccctcgtgcgctctcctgttccgaccctgccgcttaccggatacctgtccgcctttctcccttcgggaagcgtggcgctttctcatagctcacgctgtaggtatctcagttcggtgtaggtcgttcgctccaagctgggctgtgtgcacgaaccccccgttcagcccgaccgctgcgccttatccggtaactatcgtcttgagtccaacccggtaagacacgacttatcgccactggcagcagccactggtaacaggattagcagagcgaggtatgtaggcggtgctacagagttcttgaagtggtggcctaactacggctacactagaagaacagtatttggtatctgcgctctgctgaagccagttaccttcggaaaaagagttggtagctcttgatccggcaaacaaaccaccgctggtagcggtggtttttttgtttgcaagcagcagattacgcgcagaaaaaaaggatctcaagaagatcctttgatcttttctacggggtctgacgctcagtggaacgaaaactcacgttaagggattttggtcatgagattatcaaaaaggatcttcacctagaaggtcctgtattagaggtcacgtgagtgttttgcgacattttgcgacaccatgtggtcacgctgggtatttaagcccgagtgagcacgcagggtctccattttgaagcgggaggtttgaacgcgcagccgccatccttttaaattaaaaatgaagttttaaatcaagcccaatctgaataatgttacaaccaattaaccaattctgattagaaaaactcatcgagcatcaaatgaaactgcaatttattcatatcaggattatcaataccatatttttgaaaaagccgtttctgtaatgaaggagaaaactcaccgaggcagttccataggatggcaagatcctggtatcggtctgcgattccgactcgtccaacatcaatacaacctattaatttcccctcgtcaaaaataaggttatcaagtgagaaatcaccatgagtgacgactgaatccggtgagaatggcaaaagtttatgcatttctttccagacttgttcaacaggccagccattacgctcgtcatcaaaatcactcgcatcaaccaaaccgttattcattcgtgattgcgcctgagcgagacgaaatacgcgatcgctgttaaaaggacaattacaaacaggaatcgaatgcaaccggcgcaggaacactgccagcgcatcaacaatattttcacctgaatcaggatattcttctaatacctggaatgctgtttttccggggatcgcagtggtgagtaaccatgcatcatcaggagtacggataaaatgcttgatggtcggaagaggcataaattccgtcagccagtttagtctgaccatctcatctgtaacatcattggcaacgctacctttgccatgtttcagaaacaactctggcgcatcgggcttcccatacaagcgatagattgtcgcacctgattgcccgacattatcgcgagcccatttatacccatataaatcagcatccatgttggaatttaatcgcggcctcgacgtttcccgttgaatatggctcataacaccccttgtattactgtttatgtaagcagacagttttattgttcatgatgatatatttttatcttgtgcaatgtaacatcagagattttgagacacgggccagagctgca

SEQ ID NO: 270 - DNA, 17353 bp, synthetic construct
  source 1..17353: mol_type = other DNA
tcgcgcgtttcggtgatgacggtgaaaacctctgacacatgcagctcccggagacggtcacagcttgtctgtaagcggatgccgggagcagacaagcccgtcagggcgcgtcagcgggtgttggcgggtgtcggggctggcttaactatgcggcatcagagcagattgtactgagagtgcaccatatgcggtgtgaaataccgcacagatgcgtaaggagaaaataccgcatcaggcgccattcgccattcaggctgcgcaactgttgggaagggcgatcggtgcgggcctcttcgctattacgccagctggcgaaagggggatgtgctgcaaggcgattaagttgggtaacgccagggttttcccagtcacgacgttgtaaaacgacggccagagaattccgcagggtctccattttgaagcgggaggtttgaacgcgcagccgccatgccggggttttacgagattgtgattaaggtccccagcgaccttgacgagcatctgcccggcatttctgacagctttgtgaactgggtggccgagaaggaatgggagttgccgccagattctgacatggatctgaatctgattgagcaggcacccctgaccgtggccgagaagctgcagcgcgactttctgacggaatggcgccgtgtgagtaaggccccggaggctcttttctttgtgcaatttgagaagggagagagctacttccacatgcacgtgctcgtggaaaccaccggggtgaaatccatggttttgggacgtttcctgagtcagattcgcgaaaaactgattcagagaatttaccgcgggatcgagccgactttgccaaactggttcgcggtcacaaagaccagaaatggcgccggaggcgggaacaaggtggtggatgagtgctacatccccaattacttgctccccaaaacccagcctgagctccagtgggcgtggactaatatggaacagtatttaagcgcctgtttgaatctcacggagcgtaaacggttggtggcgcagcatctgacgcacgtgtcgcagacgcaggagcagaacaaagagaatcagaatcccaattctgatgcgccggtgatcagatcaaaaacttcagccaggtacatggagctggtcgggtggctcgtggacaaggggattacctcggagaagcagtggatccaggaggaccaggcctcatacatctccttcaatgcggcctccaactcgcggtcccaaatcaaggctgccttggacaatgcgggaaagattatgagcctgactaaaaccgcccccgactacctggtgggccagcagcccgtggaggacatttccagcaatcggatttataaaattttggaactaaacgggtacgatccccaatatgcggcttccgtctttctgggatgggccacgaaaaagttcggcaagaggaacaccatctggctgtttgggcctgcaactaccgggaagaccaacatcgcggaggccatagcccacactgtgcccttctacgggtgcgtaaactggaccaatgagaactttcccttcaacgactgtgtcgacaagatggtgatctggtgggaggaggggaagatgaccgccaaggtcgtggagtcggccaaagccattctcggaggaagcaaggtgcgcgtggaccagaaatgcaagtcctcggcccagatagacccgactcccgtgatcgtcacctccaacaccaacatgtgcgccgtgattgacgggaactcaacgaccttcgaacaccagcagccgttgcaagaccggatgttcaaatttgaactcacccgccgtctggatcatgactttgggaaggtcaccaagcaggaagtcaaagactttttccggtgggcaaaggatcacgtggttgaggtggagcatgaattctacgtcaaaaagggtggagccaagaaaagacccgcccccagtgacgcagatataagtgagcccaaacgggtgcgcgagtcagttgcgcagccatcgacgtcagacgcggaagcttcgatcaactacgcagacaggtaccaaaacaaatgttctcgtcacgtgggcatgaatctgatgctgtttccctgcagacaatgcgagagaatgaatcagaattcaaatatctgcttcactcacggacagaaagactgtttagagtgctttcccgtgtcagaatctcaacccgtttctgtcgtcaaaaaggcgtatcagaaactgtgctacattcatcatatcatgggaaaggtgccagacgcttgcactgcctgcgatctggtcaatgtggatttggatgactgcatctttgaacaataaatgatttaaatcaggtatggctgccgatggttatcttccagattggctcgaggacaacctctctgagggcattcgcgagtggtgggcgctgaaacctggagccccgaagcccaaagccaaccagcaaaagcaggacgacggccggggtctggtgcttcctggctacaagtacctcggacccttcaacggactcgacaagggggagcccgtcaacgcggcggacgcagcggccctcgagcacgacaaggcctacgaccagcagctgcaggcgggtgacaatccgtacctgcggtataaccacgccgacgccgagtttcaggagcgtctgcaagaagatacgtcttttgggggcaacctcgggcgagcagtcttccaggccaagaagcgggttctcgaacctctcggtctggttgaggaaggcgctaagacggctcctggaaagaagagaccggtagagccatcaccccagcgttctccagactcctctacgggcatcggcaagaaaggccaacagcccgccagaaaaagactcaattttggtcagactggcgactcagagtcagttccagaccctcaacctctcggagaacctccagcagcgccctctggtgtgggacctaatacaatggctgcaggcggtggcgcaccaatggcagacaataacgaaggcgccgacggagtgggtagttcctcgggaaattggcattgcgattccacatggctgggcgacagagtcatcaccaccagcacccgaacctgggccctgcccacctacaacaaccacctctacaagcaaatctccaacgggacatcgggaggagccaccaacgacaacacctacttcggctacagcaccccctgggggtattttgactttaacagattccactgccacttttcaccacgtgactggcagcgactcatcaacaacaactggggattccggcccaagagactcagcttcaagctcttcaacatccaggtcaaggaggtcacgcagaatgaaggcaccaagaccatcgccaataacctcaccagcaccatccaggtgtttacggactcggagtaccagctgccgtacgttctcggctctgcccaccagggctgcctgcctccgttcccggcggacgtgttcatgattccccagtacggctacctaacactcaacaacggtagtcaggccgtgggacgctcctccttctactgcctggaatactttccttcgcagatgctgagaaccggcaacaacttccagtttacttacaccttcgaggacgtgcctttccacagcagctacgcccacagccagagcttggaccggctgatgaatcctctgattgaccagtacctgtactacttgtctcggactcaaacaacaggaggcacggcaaatacgcagactctgggcttcagccaaggtgggcctaatacaatggccaatcaggcaaagaactggctgccaggaccctgttaccgccaacaacgcgtctcaacgacaaccgggcaaaacaacaatagcaactttgcctggactgctgggaccaaataccatctgaatggaagaaattcattggctaatcctggcatcgctatggcaacacacaaagacgacgaggagcgtttttttcccagtaacgggatcctgatttttggcaaacaaaatgctgccagagacaatgcggattacagcgatgtcatgctcaccagcgaggaagaaatcaaaaccactaaccctgtggctacagaggaatacggtatcgtggcagataacttgcagcagcaaaacacggctcctcaaattggaactgtcaacagccagggggccttacccggtatggtctggcagaaccgggacgtgtacctgcagggtcccatctgggccaagattcctcacacggacggcaacttccacccgtctccgctgatgggcggctttggcctgaaacatcctccgcctcagatcctgatcaagaacacgcctgtacctgcggatcctccgaccaccttcaaccagtcaaagctgaactctttcatcacgcaatacagcaccggacaggtcagcgtggaaattgaatgggagctgcagaaggaaaacagcaagcgctggaaccccgagatccagtacacctccaactactacaaatctacaagtgtggactttgctgttaatacagaaggcgtgtactctgaaccccgccccattggcacccgttacctcacccgtaatctgtaattgcctgttaatcaataaaccggttgattcgtttcagttgaactttggtctctgcgaagggcgaattcgtttaaacctgcaggactagagccgaattctgcatcgcgatagggataacagggtaataaataatgtactagagacactttcaataaaggcaaatgcttttatttgtacactctcgggtgattatttacccccacccttgccgtctgcgccgttcagaagtcgaaggggttctgtctggcatcggaatgggccacgggcagagacacgttccggtactggtgcttggtggaccacttgaactcaggcacgaccattctaggcagctctgtgaagttctcgctccacaggctccgcaccatcaccagggcgttcagcaggtcaggggcgctgattttgaagtcgcagttaggtccgccgccctgggctctgctgtttctgtacacagggttgcagcactggaacacaataagagcagggtggtgcacgctggccagcacagacttgtcgctgatcaggtcggcgtcgagatcctcggcgttagacaaggcaaaaggggtcagcttgggcagctggcggcccaggaaaggggcgtggccgggcttgctattgcactcgcatctcagaggcatcagcaggtggccgtggccggtctgggcgttggggtacagggcctgcataaaggccttgatctgtttgaaggccacttgggccttggcgccttcggagaagaacatgccgcagcttttgccgctgaactggttggcggggcaggcggcgtcgtgcacacaacaccgggcgtcggtattgctgatctgcaccacgtttctgccccatctgttcttcacgatcttggccttgctgctctgctctttcagggccctctggccgttctcagaggtgacgtccatctcgatcacatgttccttgttgatcatgatgctgccgtgcagacacttcagctcgccctcgatttccgcgcatctgtgcagccacagggcacaaccggtaggctcgtggtgcttgtatgtcacctcagcaaaagattgcaggtaggcttgcaggaatctgcccatcatggtcacgaaggtcttgttggaggtaaaagtcagctgcagtcctctgtgttcctcgttcagccatgtcttgcacacggcggccagagcctcgacctgatctggcagcagcttgaaattagccttcaggtcgttgtccacgtgatacttatccatcagtgctctggcggcttccatgcccttctcccaggcggaaacgatgggcacgctcagggggttcatcacggtgatctcgctttcagcttctgaaggttcctcctcttcctcctgtgttctcatgccccgagccacggggtcgtcctcattcagtctccgcacggttctttttcctccctttccgtgcttaatcagtacaggaggattagagaagcccaccatctggagggcgacgtcctccctttcttcttcgctatccacgatcacttctgggctggggggccgttcaggctttgggctaggccgtttttttttcttcttaggggcgatagccagatcagcggcgcttgtagagggccgaggactaggggttctaggcacgagggcgtcctggctgctgtcctcctcatcctcgctctcgatccgtctccgcattctcttcttagggggggcccgcggagggggagggctagggctaggggacgacacatcttccatggttggaggtctgcgagcagcgcctctgcctctctctggtgttgtctcgcgctgttcttcctctctagaggccatttccttctcctataggcagaaaaagatcgttgaaactcactccggggctgtggacgtcggcttaccttcgcaaatttgtacctgaggactaccacgcccacgagattaggttctacgaagaccaatcccgcccgcctaatgcggagcttaccgcctgcgtcattacccagggccacattcttggccaattgcaagccatcaacaaagcccgccaagagtttctgctacgaaagggacggggggtttacttggacccccagtccggcgaggagctcaacccaatccccccgccgccgcagccctatcagcagcagccgcgggcccttgcttcccaggatggcacccaaaaagaagctgcagctgccgccgccacccacggacgaggaggaatactgggacagtcaggcagaggaggttttggacgaggaggaggaggacatgatggaagactgggagagcctagacgaggaagcttccgaggtcgaagaggtgtcagacgaaacaccgtcaccctcggtcgcattcccctcgccggcgccccagaaatcggcaaccggttccagcatggctacaacctccgctcctcaggcgccgccggcactgcccgttcgccgacccaaccgtagatgggacaccactggaaccagggccggtaagtccaagcagccgccgccgttagcccaagagcaacaacagcgccaaggctaccgctcatggcgcgggcacaagaacgccatagttgcttgcttgcaagactgtgggggcaacatctccttcgcccgccgctttcttctctaccatcacggcgtggccttcccccgtaacatcctgcattactaccgtcatctctacagcccatactgcaccggcggcagcggcagcaacagcagcggccacacagaagcaaaggcgaccggatagcaagactctgacaaagcccaagaaatccacagcggcggcagcagcaggaggaggagcgctgcgtctggcgcccaacgaacccgtatcgacccgcgagcttagaaacaggatttttcccactctgtatgctatatttcaacagagcaggggccaagaacaagagctgaaaataaaaaacaggtctctgcgatccctcacccgcagctgcctgtatcacaaaagcgaagatcagcttcggcgcacgctggaagacgcggaggctctcttcagtaaatactgcgcgctgactcttaaggactagtttcgcgccctttctcaaatttaagcgcgaaaactacgtcatctccagcggccacacccggcgccagcacctgttgtcagcgccattttttagggcggagtaacttgtatgtgttgggaattgtagttttcttaaaatgggaagtgacgtaacgtgggaaaacggaagtgacgatttgaggaagttgtgggttttttggctttcgtttctgggcgtaggttcgcgtgcggttttctgggtgttttttgtggactttaaccgttacgtcattttttagtcctatatatactcgctctgcacttggcccttttttacactgtgactgattgagctggtgccgtgtcgagtggtgtttttttaataggttttcttttttactggtaaggctgactgttatgactacgtccggcgttccatttggcatgacactacgaccaacacgatctcggttgtctcggcgcactccgtacagtagggatcgtctacctccttttgagacagaaacccgcgctaccatactggaggatcatccgctgctgcccgaatgtaacactttgacaatgcacaacgtgagttacgtgcgaggtcttccctgcagtgtgggatttacgctgattcaggaatgggttgttccctgggatatggttctaacgcgggaggagcttgtaatcctgaggaagtgtatgcacgtgtgcctgtgttgtgccaacattgatatcatgacgagcatgatgatccatggttacgagtcctgggctctccactgtcattgttccagtcccggttccctgcagtgtatagccggcgggcaggttttggccagctggtttaggatggtggtggatggcgccatgtttaatcagaggtttatatggtaccgggaggtggtgaattacaacatgccaaaagaggtaatgtttatgtccagcgtgtttatgaggggtcgccacttaatctacctgcgcttgtggtatgatggccacgtgggttctgtggtccccgccatgagctttggatacagcgccttgcactgtgggattttgaacaatattgtggtgctgtgctgcagttactgtgctgatttaagtgagatcagggtgcgctgctgtgcccggaggacaaggcgccttatgctgcgggcggtgcgaatcatcgctgaggagaccactgccatgttgtattcctgcaggacggagcggcggcggcagcagtttattcgcgcgctgctgcagcaccaccgccctatcctgatgcacgattatgactctacccccatgtaggcgtggacttctccttcgccgcccgttaagcaaccgcaagttggacagcagcctgtggctcagcagctggacagcgacatgaacttaagtgagctgcccggggagtttattaatatcactgatgagcgtttggctcgacaggaaaccgtgtggaatataacacctaagaatatgtctgttacccatgatatgatgctttttaaggccagccggggagaaaggactgtgtactctgtgtgttgggagggaggtggcaggttgaatactagggttctgtgagtttgattaaggtacggtgatctgtataagctatgtggtggtggggctatactactgaatgaaaaatgacttgaaattttctgcaattgaaaaataaacacgttgaaacataacacaaacgattctttattcttgggcaatgtatgaaaaagtgtaagaggatgtggcaaatatttcattaatgtagttgtggccagaccagtcccatgaaaatgacatagagtatgcacttggagttgtgtctcctgtttcctgtgtaccgtttagtgtaatggttagtgttacaggtttagttttgtctccgtttaagtaaacttgactgacaatgttacttttggcagttttaccgtgagattttggataagctgataggttaggcataaatccaacagcgtttgtataggctgtcgcccctcctgacgcggtaggaggaggggagggtgccctgcatgtctgccgctgctcttgctcttgccgctgctgaggaggggggcgcatctgccgcagcaccggatgcatctgggaaaagcaaaaaaggggctcgtccctgtttccggaggaatttgcaagcggggtcttgcatgacggggaggcaaacccccgttcgccgcagtccggccggtccgagactcgaaccgggggtcccgcgactcaacccttggaaaataaccctccggctacagggagcgagccacttaatgctttcgctttccagcctaaccgcttacgctgcgcgcggccagtggccaaaaaagctagcgcagcagccgccgcgcctggaaggaagccaaaaggagcactcccccgttgtctgacgtcgcacacctgggttcgacacgcgggcggtaaccgcatggatcacggcggacggccggatacggggctcgaaccccggtcgtccgccatgatacccttgcgaatttatccaccagaccacggaagagtgcccgcttacaggctctccttttgcacggtctagagcgtcaacgattgcgcgcgcctgaccggccagagcgtcccgaccatggagcactttttgccgctgcgcaacatctggaaccgcgtccgcgactttccgcgcgcctccaccaccgccgccggcatcacctggatgtccaggtacatctacggatatggcaaacagctattatgggtattatgggtgcggccgcggatcccgggcccgtcgactgcagaggcctgcatgcaagcttggtgtaatcatggtcatagctgtttcctgtgtgaaattgttatccgctcacaattccacacaacatacgagccggaagcataaagtgtaaagcctggggtgcctaatgagtgagctaactcacattaattgcgttgcgctcactgcccgctttccagtcgggaaacctgtcgtgccagctgcattaatgaatcggccaacgcgcggggagaggcggtttgcgtattgggcgctcttccgcttcctcgctcactgactcgctgcgctcggtcgttcggctgcggcgagcggtatcagctcactcaaaggcggtaatacggttatccacagaatcaggggataacgcaggaaagaacatgtgagcaaaaggccagcaaaaggccaggaaccgtaaaaaggccgcgttgctggcgtttttccataggctccgcccccctgacgagcatcacaaaaatcgacgctcaagtcagaggtggcgaaacccgacaggactataaagataccaggcgtttccccctggaagctccctcgtgcgctctcctgttccgaccctgccgcttaccggatacctgtccgcctttctcccttcgggaagcgtggcgctttctcatagctcacgctgtaggtatctcagttcggtgtaggtcgttcgctccaagctgggctgtgtgcacgaaccccccgttcagcccgaccgctgcgccttatccggtaactatcgtcttgagtccaacccggtaagacacgacttatcgccactggcagcagccactggtaacaggattagcagagcgaggtatgtaggcggtgctacagagttcttgaagtggtggcctaactacggctacactagaagaacagtatttggtatctgcgctctgctgaagccagttaccttcggaaaaagagttggtagctcttgatccggcaaacaaaccaccgctggtagcggtggtttttttgtttgcaagcagcagattacgcgcagaaaaaaaggatctcaagaagatcctttgatcttttctacggggtctgacgctcagtggaacgaaaactttaattaaggccttaattaggctgcgcgctcgctcgctcactgaggccgcccgggcaaagcccgggcgtcgggcgacctttggtcgcccggcctcagtgagcgagcgagcgcgcagagagggagtggccaactccatcactaggggttcctcatatgcagggtaatggggatcctctagaggccgtccgccctcggcaccatcctcacgacacccaaatatggcgacgggtgaggaatggtggggagttatttttagagcggtgaggaaggtgggcaggcagcaggtgttgggggagttatttttagagcggggagttatttttagagcggaggaatggtggacacccaaatatggcgacggttcctcacggacacccaaatatggcgacgggccctcggccggggccgcattcctgggggccgggcggtgctcccgcccgcctcgataaaaggctccggggccggcggcggcccacgagctacccggaggagcgggaggcgccaagcggaattcgccaccatgctttggtgggaagaggtggaagattgctatgagagggaagatgtgcagaagaaaaccttcaccaaatgggtcaatgcccagttcagcaagtttggcaagcagcacattgagaacctgttcagtgacctgcaggatggcagaaggctgctggatctgctggaaggcctgacaggccagaagctgcctaaagagaagggcagcacaagagtgcatgccctgaacaatgtgaacaaggccctgagagtgctgcagaacaacaatgtggacctggtcaatattggcagcacagacattgtggatggcaaccacaagctgaccctgggcctgatctggaacatcatcctgcactggcaagtgaagaatgtgatgaagaacatcatggctggcctgcagcagaccaactctgagaagatcctgctgagctgggtcagacagagcaccagaaactaccctcaagtgaatgtgatcaacttcaccacctcttggagtgatggactggccctgaatgccctgatccacagccacagacctgacctgtttgactggaactctgttgtgtgccagcagtctgccacacagagactggaacatgccttcaacattgccagataccagctgggaattgagaaactgctggaccctgaggatgtggacaccacctatcctgacaagaaatccatcctcatgtacatcaccagcctgttccaggtgctgccccagcaagtgtccattgaggccattcaagaggttgagatgctgcccagacctcctaaagtgaccaaagaggaacacttccagctgcaccaccagatgcactactctcagcagatcacagtgtctctggcccagggatatgagagaacaagcagccccaagcctaggttcaagagctatgcctacacacaggctgcctatgtgaccacatctgaccccacaagaagcccatttccaagccagcatctggaagcccctgaggacaagagctttggcagcagcctgatggaatctgaagtgaacctggatagataccagacagccctggaagaagtgctgtcctggctgctgtctgctgaggatacactgcaggctcagggtgaaatcagcaatgatgtggaagtggtcaaggaccagtttcacacccatgagggctacatgatggacctgacagcccaccagggcagagtgggaaatatcctgcagctgggctccaagctgattggcacaggcaagctgtctgaggatgaagagacagaggtgcaagagcagatgaacctgctgaacagcagatgggagtgtctgagagtggccagcatggaaaagcagagcaacctgcacagagtgctcatggacctgcagaatcagaaactgaaagaactgaatgactggctgaccaagacagaagaaaggactaggaagatggaagaggaacctctgggaccagacctggaagatctgaaaagacaggtgcagcagcataaggtgctgcaagaggaccttgagcaagagcaagtcagagtgaacagcctgacacacatggtggtggttgtggatgagtcctctggggatcatgccacagctgctctggaagaacagctgaaggtgctgggagacagatgggccaacatctgtaggtggacagaggatagatgggtgctgctccaggacattctgctgaagtggcagagactgacagaggaacagtgcctgttttctgcctggctctctgagaaagaggatgctgtcaacaagatccataccacaggcttcaaggatcagaatgagatgctcagctccctgcagaaactggctgtgctgaaggctgacctggaaaagaaaaagcagtccatgggcaagctctacagcctgaagcaggacctgctgtctaccctgaagaacaagtctgtgacccagaaaactgaggcctggctggacaactttgctagatgctgggacaacctggtgcagaagctggaaaagtctacagcccagatcagccagcaacctgatcttgcccctggcctgaccacaattggagcctctccaacacagactgtgaccctggttacccagccagtggtcaccaaagagacagccatcagcaaactggaaatgcccagctctctgatgctggaagtccccacactggaaaggctgcaagaacttcaagaggccacagatgagctggacctgaagctgagacaggctgaagtgatcaaaggcagctggcagccagttggggacctgctcattgatagcctgcaggaccatctggaaaaagtgaaagccctgaggggagagattgcccctctgaaagaaaatgtgtcccatgtgaatgacctggccagacagctgaccacactgggaatccagctgagcccctacaacctgagcacccttgaggacctgaacaccaggtggaagctcctccaggtggcagtggaagatagagtcaggcagctgcatgaggcccacagagattttggaccagccagccagcactttctgtctacctctgtgcaaggcccctgggagagagctatctctcctaacaaggtgccctactacatcaaccatgagacacagaccacctgttgggatcaccccaagatgacagagctgtaccagagtctggcagacctcaacaatgtcagattcagtgcctacaggactgccatgaagctcagaaggctccagaaagctctgtgcctggacctgctttccctgagtgcagcttgtgatgccctggaccagcacaatctgaagcagaatgaccagcctatggacatcctccagatcatcaactgcctcaccaccatctatgataggctggaacaagagcacaacaatctggtcaatgtgcccctgtgtgtggacatgtgcctgaattggctgctgaatgtgtatgacacaggcagaacaggcaggatcagagtcctgtccttcaagacaggcatcatctccctgtgcaaagcccacttggaggacaagtacagatacctgttcaagcaagtggcctccagcacaggcttttgtgaccagagaaggctgggcctgctcctgcatgacagcattcagatccctagacagctgggagaagtggcttcctttggaggcagcaatattgagccatcagtcaggtcctgttttcagtttgccaacaacaagcctgagattgaggctgccctgttcctggactggatgagacttgagcctcagagcatggtctggctgcctgtgcttcatagagtggctgctgctgagactgccaagcaccaggccaagtgcaacatctgcaaagagtgccccatcattggcttcagatacagatccctgaagcacttcaactatgatatctgccagagctgcttctttagtggcagggttgccaagggccacaaaatgcactaccccatggtggaatactgcaccccaacaacctctggggaagatgttagagactttgccaaggtgctgaaaaacaagttcaggaccaagagatactttgctaagcaccccagaatgggctacctgcctgtccagacagtgcttgagggtgacaacatggaaacccctgtgacactgatcaatttctggccagtggactctgcccctgcctcaagtccacagctgtcccatgatgacacccacagcagaattgagcactatgcctccagactggcagagatggaaaacagcaatggcagctacctgaatgatagcatcagccccaatgagagcattgatgatgagcatctgctgatccagcactactgtcagtccctgaaccaggactctccactgagccagcctagaagccctgctcagatcctgatcagccttgagtctgaggaaaggggagagctggaaagaatcctggcagatcttgaggaagagaacagaaacctgcaggcagagtatgacaggctcaaacagcagcatgagcacaagggactgagccctctgccttctcctcctgaaatgatgcccacctctccacagtctccaaggtgatgactcgagaggcctaataaagagctcagatgcatcgatcagagtgtgttggttttttgtgtgccagggtaatgggctagctgcggccgcaggaacccctagtgatggagttggccactccctctctgcgcgctcgctcgctcactgaggccgggcgaccaaaggtcgcccgacgcccgggctttgcccgggcggcctcagtgagcgagcgagcgcgcagccttaattaacacgttaagggattttggtcatgagattatcaaaaaggatcttcacctagaaggtcctgtattagaggtcacgtgagtgttttgcgacattttgcgacaccatgtggtcacgctgggtatttaagcccgagtgagcacgcagggtctccattttgaagcgggaggtttgaacgcgcagccgccatccttttaaattaaaaatgaagttttaaatcaagcccaatctgaataatgttacaaccaattaaccaattctgattagaaaaactcatcgagcatcaaatgaaactgcaatttattcatatcaggattatcaataccatatttttgaaaaagccgtttctgtaatgaaggagaaaactcaccgaggcagttccataggatggcaagatcctggtatcggtctgcgattccgactcgtccaacatcaatacaacctattaatttcccctcgtcaaaaataaggttatcaagtgagaaatcaccatgagtgacgactgaatccggtgagaatggcaaaagtttatgcatttctttccagacttgttcaacaggccagccattacgctcgtcatcaaaatcactcgcatcaaccaaaccgttattcattcgtgattgcgcctgagcgagacgaaatacgcgatcgctgttaaaaggacaattacaaacaggaatcgaatgcaaccggcgcaggaacactgccagcgcatcaacaatattttcacctgaatcaggatattcttctaatacctggaatgctgtttttccggggatcgcagtggtgagtaaccatgcatcatcaggagtacggataaaatgcttgatggtcggaagaggcataaattccgtcagccagtttagtctgaccatctcatctgtaacatcattggcaacgctacctttgccatgtttcagaaacaactctggcgcatcgggcttcccatacaagcgatagattgtcgcacctgattgcccgacattatcgcgagcccatttatacccatataaatcagcatccatgttggaatttaatcgcggcctcgacgtttcccgttgaatatggctcataacaccccttgtattactgtttatgtaagcagacagttttattgttcatgatgatatatttttatcttgtgcaatgtaacatcagagattttgagacacgggccagagctgca

SEQ ID NO: 271 - DNA, 10270 bp, synthetic construct
  source 1..10270: mol_type = other DNA
tcagaagtcgaaggggttctgtctggcatcggaatgggccacgggcagagacacgttccggtactggtgcttggtggaccacttgaactcaggcacgaccattctaggcagctctgtgaagttctcgctccacaggctccgcaccatcaccagggcgttcagcaggtcaggggcgctgattttgaagtcgcagttaggtccgccgccctgggctctgctgtttctgtacacagggttgcagcactggaacacaataagagcagggtggtgcacgctggccagcacagacttgtcgctgatcaggtcggcgtcgagatcctcggcgttagacaaggcaaaaggggtcagcttgggcagctggcggcccaggaaaggggcgtggccgggcttgctattgcactcgcatctcagaggcatcagcaggtggccgtggccggtctgggcgttggggtacagggcctgcataaaggccttgatctgtttgaaggccacttgggccttggcgccttcggagaagaacatgccgcagcttttgccgctgaactggttggcggggcaggcggcgtcgtgcacacaacaccgggcgtcggtattgctgatctgcaccacgtttctgccccatctgttcttcacgatcttggccttgctgctctgctctttcagggccctctggccgttctcagaggtgacgtccatctcgatcacatgttccttgttgatcatgatgctgccgtgcagacacttcagctcgccctcgatttccgcgcatctgtgcagccacagggcacaaccggtaggctcgtggtgcttgtatgtcacctcagcaaaagattgcaggtaggcttgcaggaatctgcccatcatggtcacgaaggtcttgttggaggtaaaagtcagctgcagtcctctgtgttcctcgttcagccatgtcttgcacacggcggccagagcctcgacctgatctggcagcagcttgaaattagccttcaggtcgttgtccacgtgatacttatccatcagtgctctggcggcttccatgcccttctcccaggcggaaacgatgggcacgctcagggggttcatcacggtgatctcgctttcagcttctgaaggttcctcctcttcctcctgtgttctcatgccccgagccacggggtcgtcctcattcagtctccgcacggttctttttcctccctttccgtgcttaatcagtacaggaggattagagaagcccaccatctggagggcgacgtcctccctttcttcttcgctatccacgatcacttctgggctggggggccgttcaggctttgggctaggccgtttttttttcttcttaggggcgatagccagatcagcggcgcttgtagagggccgaggactaggggttctaggcacgagggcgtcctggctgctgtcctcctcatcctcgctctcgatccgtctccgcattctcttcttagggggggcccgcggagggggagggctagggctaggggacgacacatcttccatggttggaggtctgcgagcagcgcctctgcctctctctggtgttgtctcgcgctgttcttcctctctagaggccatttccttctcctataggcagaaaaagatcgttgaaactcactccggggctgtggacgtcggcttaccttcgcaaatttgtacctgaggactaccacgcccacgagattaggttctacgaagaccaatcccgcccgcctaatgcggagcttaccgcctgcgtcattacccagggccacattcttggccaattgcaagccatcaacaaagcccgccaagagtttctgctacgaaagggacggggggtttacttggacccccagtccggcgaggagctcaacccaatccccccgccgccgcagccctatcagcagcagccgcgggcccttgcttcccaggatggcacccaaaaagaagctgcagctgccgccgccacccacggacgaggaggaatactgggacagtcaggcagaggaggttttggacgaggaggaggaggacatgatggaagactgggagagcctagacgaggaagcttccgaggtcgaagaggtgtcagacgaaacaccgtcaccctcggtcgcattcccctcgccggcgccccagaaatcggcaaccggttccagcatggctacaacctccgctcctcaggcgccgccggcactgcccgttcgccgacccaaccgtagatgggacaccactggaaccagggccggtaagtccaagcagccgccgccgttagcccaagagcaacaacagcgccaaggctaccgctcatggcgcgggcacaagaacgccatagttgcttgcttgcaagactgtgggggcaacatctccttcgcccgccgctttcttctctaccatcacggcgtggccttcccccgtaacatcctgcattactaccgtcatctctacagcccatactgcaccggcggcagcggcagcaacagcagcggccacacagaagcaaaggcgaccggatagcaagactctgacaaagcccaagaaatccacagcggcggcagcagcaggaggaggagcgctgcgtctggcgcccaacgaacccgtatcgacccgcgagcttagaaacaggatttttcccactctgtatgctatatttcaacagagcaggggccaagaacaagagctgaaaataaaaaacaggtctctgcgatccctcacccgcagctgcctgtatcacaaaagcgaagatcagcttcggcgcacgctggaagacgcggaggctctcttcagtaaatactgcgcgctgactcttaaggactagtttcgcgccctttctcaaatttaagcgcgaaaactacgtcatctccagcggccacacccggcgccagcacctgttgtcagcgccattttttagggcggagtaacttgtatgtgttgggaattgtagttttcttaaaatgggaagtgacgtaacgtgggaaaacggaagtgacgatttgaggaagttgtgggttttttggctttcgtttctgggcgtaggttcgcgtgcggttttctgggtgttttttgtggactttaaccgttacgtcattttttagtcctatatatactcgctctgcacttggcccttttttacactgtgactgattgagctggtgccgtgtcgagtggtgtttttttaataggttttcttttttactggtaaggctgactgttatgactacgtccggcgttccatttggcatgacactacgaccaacacgatctcggttgtctcggcgcactccgtacagtagggatcgtctacctccttttgagacagaaacccgcgctaccatactggaggatcatccgctgctgcccgaatgtaacactttgacaatgcacaacgtgagttacgtgcgaggtcttccctgcagtgtgggatttacgctgattcaggaatgggttgttccctgggatatggttctaacgcgggaggagcttgtaatcctgaggaagtgtatgcacgtgtgcctgtgttgtgccaacattgatatcatgacgagcatgatgatccatggttacgagtcctgggctctccactgtcattgttccagtcccggttccctgcagtgtatagccggcgggcaggttttggccagctggtttaggatggtggtggatggcgccatgtttaatcagaggtttatatggtaccgggaggtggtgaattacaacatgccaaaagaggtaatgtttatgtccagcgtgtttatgaggggtcgccacttaatctacctgcgcttgtggtatgatggccacgtgggttctgtggtccccgccatgagctttggatacagcgccttgcactgtgggattttgaacaatattgtggtgctgtgctgcagttactgtgctgatttaagtgagatcagggtgcgctgctgtgcccggaggacaaggcgccttatgctgcgggcggtgcgaatcatcgctgaggagaccactgccatgttgtattcctgcaggacggagcggcggcggcagcagtttattcgcgcgctgctgcagcaccaccgccctatcctgatgcacgattatgactctacccccatgtaggcgtggacttctccttcgccgcccgttaagcaaccgcaagttggacagcagcctgtggctcagcagctggacagcgacatgaacttaagtgagctgcccggggagtttattaatatcactgatgagcgtttggctcgacaggaaaccgtgtggaatataacacctaagaatatgtctgttacccatgatatgatgctttttaaggccagccggggagaaaggactgtgtactctgtgtgttgggagggaggtggcaggttgaatactagggttctgtgagtttgattaaggtacggtgatctgtataagctatgtggtggtggggctatactactgaatgaaaaatgacttgaaattttctgcaattgaaaaataaacacgttgaaacataacacaaacgattctttattcttgggcaatgtatgaaaaagtgtaagaggatgtggcaaatatttcattaatgtagttgtggccagaccagtcccatgaaaatgacatagagtatgcacttggagttgtgtctcctgtttcctgtgtaccgtttagtgtaatggttagtgttacaggtttagttttgtctccgtttaagtaaacttgactgacaatgttacttttggcagttttaccgtgagattttggataagctgataggttagttaattaaggccttaattaggctgcgcgctcgctcgctcactgaggccgcccgggcaaagcccgggcgtcgggcgacctttggtcgcccggcctcagtgagcgagcgagcgcgcagagagggagtggccaactccatcactaggggttcctcatatgcagggtaatggggatcctctagaggccgtccgccctcggcaccatcctcacgacacccaaatatggcgacgggtgaggaatggtggggagttatttttagagcggtgaggaaggtgggcaggcagcaggtgttgggggagttatttttagagcggggagttatttttagagcggaggaatggtggacacccaaatatggcgacggttcctcacggacacccaaatatggcgacgggccctcggccggggccgcattcctgggggccgggcggtgctcccgcccgcctcgataaaaggctccggggccggcggcggcccacgagctacccggaggagcgggaggcgccaagcggaattcgccaccatgctttggtgggaagaggtggaagattgctatgagagggaagatgtgcagaagaaaaccttcaccaaatgggtcaatgcccagttcagcaagtttggcaagcagcacattgagaacctgttcagtgacctgcaggatggcagaaggctgctggatctgctggaaggcctgacaggccagaagctgcctaaagagaagggcagcacaagagtgcatgccctgaacaatgtgaacaaggccctgagagtgctgcagaacaacaatgtggacctggtcaatattggcagcacagacattgtggatggcaaccacaagctgaccctgggcctgatctggaacatcatcctgcactggcaagtgaagaatgtgatgaagaacatcatggctggcctgcagcagaccaactctgagaagatcctgctgagctgggtcagacagagcaccagaaactaccctcaagtgaatgtgatcaacttcaccacctcttggagtgatggactggccctgaatgccctgatccacagccacagacctgacctgtttgactggaactctgttgtgtgccagcagtctgccacacagagactggaacatgccttcaacattgccagataccagctgggaattgagaaactgctggaccctgaggatgtggacaccacctatcctgacaagaaatccatcctcatgtacatcaccagcctgttccaggtgctgccccagcaagtgtccattgaggccattcaagaggttgagatgctgcccagacctcctaaagtgaccaaagaggaacacttccagctgcaccaccagatgcactactctcagcagatcacagtgtctctggcccagggatatgagagaacaagcagccccaagcctaggttcaagagctatgcctacacacaggctgcctatgtgaccacatctgaccccacaagaagcccatttccaagccagcatctggaagcccctgaggacaagagctttggcagcagcctgatggaatctgaagtgaacctggatagataccagacagccctggaagaagtgctgtcctggctgctgtctgctgaggatacactgcaggctcagggtgaaatcagcaatgatgtggaagtggtcaaggaccagtttcacacccatgagggctacatgatggacctgacagcccaccagggcagagtgggaaatatcctgcagctgggctccaagctgattggcacaggcaagctgtctgaggatgaagagacagaggtgcaagagcagatgaacctgctgaacagcagatgggagtgtctgagagtggccagcatggaaaagcagagcaacctgcacagagtgctcatggacctgcagaatcagaaactgaaagaactgaatgactggctgaccaagacagaagaaaggactaggaagatggaagaggaacctctgggaccagacctggaagatctgaaaagacaggtgcagcagcataaggtgctgcaagaggaccttgagcaagagcaagtcagagtgaacagcctgacacacatggtggtggttgtggatgagtcctctggggatcatgccacagctgctctggaagaacagctgaaggtgctgggagacagatgggccaacatctgtaggtggacagaggatagatgggtgctgctccaggacattctgctgaagtggcagagactgacagaggaacagtgcctgttttctgcctggctctctgagaaagaggatgctgtcaacaagatccataccacaggcttcaaggatcagaatgagatgctcagctccctgcagaaactggctgtgctgaaggctgacctggaaaagaaaaagcagtccatgggcaagctctacagcctgaagcaggacctgctgtctaccctgaagaacaagtctgtgacccagaaaactgaggcctggctggacaactttgctagatgctgggacaacctggtgcagaagctggaaaagtctacagcccagatcagccagcaacctgatcttgcccctggcctgaccacaattggagcctctccaacacagactgtgaccctggttacccagccagtggtcaccaaagagacagccatcagcaaactggaaatgcccagctctctgatgctggaagtccccacactggaaaggctgcaagaacttcaagaggccacagatgagctggacctgaagctgagacaggctgaagtgatcaaaggcagctggcagccagttggggacctgctcattgatagcctgcaggaccatctggaaaaagtgaaagccctgaggggagagattgcccctctgaaagaaaatgtgtcccatgtgaatgacctggccagacagctgaccacactgggaatccagctgagcccctacaacctgagcacccttgaggacctgaacaccaggtggaagctcctccaggtggcagtggaagatagagtcaggcagctgcatgaggcccacagagattttggaccagccagccagcactttctgtctacctctgtgcaaggcccctgggagagagctatctctcctaacaaggtgccctactacatcaaccatgagacacagaccacctgttgggatcaccccaagatgacagagctgtaccagagtctggcagacctcaacaatgtcagattcagtgcctacaggactgccatgaagctcagaaggctccagaaagctctgtgcctggacctgctttccctgagtgcagcttgtgatgccctggaccagcacaatctgaagcagaatgaccagcctatggacatcctccagatcatcaactgcctcaccaccatctatgataggctggaacaagagcacaacaatctggtcaatgtgcccctgtgtgtggacatgtgcctgaattggctgctgaatgtgtatgacacaggcagaacaggcaggatcagagtcctgtccttcaagacaggcatcatctccctgtgcaaagcccacttggaggacaagtacagatacctgttcaagcaagtggcctccagcacaggcttttgtgaccagagaaggctgggcctgctcctgcatgacagcattcagatccctagacagctgggagaagtggcttcctttggaggcagcaatattgagccatcagtcaggtcctgttttcagtttgccaacaacaagcctgagattgaggctgccctgttcctggactggatgagacttgagcctcagagcatggtctggctgcctgtgcttcatagagtggctgctgctgagactgccaagcaccaggccaagtgcaacatctgcaaagagtgccccatcattggcttcagatacagatccctgaagcacttcaactatgatatctgccagagctgcttctttagtggcagggttgccaagggccacaaaatgcactaccccatggtggaatactgcaccccaacaacctctggggaagatgttagagactttgccaaggtgctgaaaaacaagttcaggaccaagagatactttgctaagcaccccagaatgggctacctgcctgtccagacagtgcttgagggtgacaacatggaaacccctgtgacactgatcaatttctggccagtggactctgcccctgcctcaagtccacagctgtcccatgatgacacccacagcagaattgagcactatgcctccagactggcagagatggaaaacagcaatggcagctacctgaatgatagcatcagccccaatgagagcattgatgatgagcatctgctgatccagcactactgtcagtccctgaaccaggactctccactgagccagcctagaagccctgctcagatcctgatcagccttgagtctgaggaaaggggagagctggaaagaatcctggcagatcttgaggaagagaacagaaacctgcaggcagagtatgacaggctcaaacagcagcatgagcacaagggactgagccctctgccttctcctcctgaaatgatgcccacctctccacagtctccaaggtgatgactcgagaggcctaataaagagctcagatgcatcgatcagagtgtgttggttttttgtgtgccagggtaatgggctagctgcggccgcaggaacccctagtgatggagttggccactccctctctgcgcgctcgctcgctcactgaggccgggcgaccaaaggtcgcccgacgcccgggctttgcccgggcggcctcagtgagcgagcgagcgcgcagccttaattaagcataaatccaacagcgtttgtataggctgtcgcccctcctgacgcggtaggaggaggggagggtgccctgcatgtctgccgctgctcttgctcttgccgctgctgaggaggggggcgcatctgccgcagcaccggatgcatctgggaaaagcaaaaaaggggctcgtccctgtttccggaggaatttgcaagcggggtcttgcatgacggggaggcaaacccccgttcgccgcagtccggccggtccgagactcgaaccgggggtcccgcgactcaacccttggaaaataaccctccggctacagggagcgagccacttaatgctttcgctttccagcctaaccgcttacgctgcgcgcggccagtggccaaaaaagctagcgcagcagccgccgcgcctggaaggaagccaaaaggagcactcccccgttgtctgacgtcgcacacctgggttcgacacgcgggcggtaaccgcatggatcacggcggacggccggatacggggctcgaaccccggtcgtccgccatgatacccttgcgaatttatccaccagaccacggaagagtgcccgcttacaggctctccttttgcacggtctagagcgtcaacgattgcgcgcgcctgaccggccagagcgtcccgaccatggagcactttttgccgctgcgcaacatctggaaccgcgtccgcgactttccgcgcgcctccaccaccgccgccggcatcacctggatgtccaggtacatctacggata

SEQ ID NO: 272 - DNA, 10270 bp, synthetic construct
  source 1..10270: mol_type = other DNA
tcagaagtcgaaggggttctgtctggcatcggaatgggccacgggcagagacacgttccggtactggtgcttggtggaccacttgaactcaggcacgaccattctaggcagctctgtgaagttctcgctccacaggctccgcaccatcaccagggcgttcagcaggtcaggggcgctgattttgaagtcgcagttaggtccgccgccctgggctctgctgtttctgtacacagggttgcagcactggaacacaataagagcagggtggtgcacgctggccagcacagacttgtcgctgatcaggtcggcgtcgagatcctcggcgttagacaaggcaaaaggggtcagcttgggcagctggcggcccaggaaaggggcgtggccgggcttgctattgcactcgcatctcagaggcatcagcaggtggccgtggccggtctgggcgttggggtacagggcctgcataaaggccttgatctgtttgaaggccacttgggccttggcgccttcggagaagaacatgccgcagcttttgccgctgaactggttggcggggcaggcggcgtcgtgcacacaacaccgggcgtcggtattgctgatctgcaccacgtttctgccccatctgttcttcacgatcttggccttgctgctctgctctttcagggccctctggccgttctcagaggtgacgtccatctcgatcacatgttccttgttgatcatgatgctgccgtgcagacacttcagctcgccctcgatttccgcgcatctgtgcagccacagggcacaaccggtaggctcgtggtgcttgtatgtcacctcagcaaaagattgcaggtaggcttgcaggaatctgcccatcatggtcacgaaggtcttgttggaggtaaaagtcagctgcagtcctctgtgttcctcgttcagccatgtcttgcacacggcggccagagcctcgacctgatctggcagcagcttgaaattagccttcaggtcgttgtccacgtgatacttatccatcagtgctctggcggcttccatgcccttctcccaggcggaaacgatgggcacgctcagggggttcatcacggtgatctcgctttcagcttctgaaggttcctcctcttcctcctgtgttctcatgccccgagccacggggtcgtcctcattcagtctccgcacggttctttttcctccctttccgtgcttaatcagtacaggaggattagagaagcccaccatctggagggcgacgtcctccctttcttcttcgctatccacgatcacttctgggctggggggccgttcaggctttgggctaggccgtttttttttcttcttaggggcgatagccagatcagcggcgcttgtagagggccgaggactaggggttctaggcacgagggcgtcctggctgctgtcctcctcatcctcgctctcgatccgtctccgcattctcttcttagggggggcccgcggagggggagggctagggctaggggacgacacatcttccatggttggaggtctgcgagcagcgcctctgcctctctctggtgttgtctcgcgctgttcttcctctctagaggccatttccttctcctataggcagaaaaagatcgttgaaactcactccggggctgtggacgtcggcttaccttcgcaaatttgtacctgaggactaccacgcccacgagattaggttctacgaagaccaatcccgcccgcctaatgcggagcttaccgcctgcgtcattacccagggccacattcttggccaattgcaagccatcaacaaagcccgccaagagtttctgctacgaaagggacggggggtttacttggacccccagtccggcgaggagctcaacccaatccccccgccgccgcagccctatcagcagcagccgcgggcccttgcttcccaggatggcacccaaaaagaagctgcagctgccgccgccacccacggacgaggaggaatactgggacagtcaggcagaggaggttttggacgaggaggaggaggacatgatggaagactgggagagcctagacgaggaagcttccgaggtcgaagaggtgtcagacgaaacaccgtcaccctcggtcgcattcccctcgccggcgccccagaaatcggcaaccggttccagcatggctacaacctccgctcctcaggcgccgccggcactgcccgttcgccgacccaaccgtagatgggacaccactggaaccagggccggtaagtccaagcagccgccgccgttagcccaagagcaacaacagcgccaaggctaccgctcatggcgcgggcacaagaacgccatagttgcttgcttgcaagactgtgggggcaacatctccttcgcccgccgctttcttctctaccatcacggcgtggccttcccccgtaacatcctgcattactaccgtcatctctacagcccatactgcaccggcggcagcggcagcaacagcagcggccacacagaagcaaaggcgaccggatagcaagactctgacaaagcccaagaaatccacagcggcggcagcagcaggaggaggagcgctgcgtctggcgcccaacgaacccgtatcgacccgcgagcttagaaacaggatttttcccactctgtatgctatatttcaacagagcaggggccaagaacaagagctgaaaataaaaaacaggtctctgcgatccctcacccgcagctgcctgtatcacaaaagcgaagatcagcttcggcgcacgctggaagacgcggaggctctcttcagtaaatactgcgcgctgactcttaaggactagtttcgcgccctttctcaaatttaagcgcgaaaactacgtcatctccagcggccacacccggcgccagcacctgttgtcagcgccattttttagggcggagtaacttgtatgtgttgggaattgtagttttcttaaaatgggaagtgacgtaacgtgggaaaacggaagtgacgatttgaggaagttgtgggttttttggctttcgtttctgggcgtaggttcgcgtgcggttttctgggtgttttttgtggactttaaccgttacgtcattttttagtcctatatatactcgctctgcacttggcccttttttacactgtgactgattgagctggtgccgtgtcgagtggtgtttttttaataggttttcttttttactggtaaggctgactgttatgactacgtccggcgttccatttggcatgacactacgaccaacacgatctcggttgtctcggcgcactccgtacagtagggatcgtctacctccttttgagacagaaacccgcgctaccatactggaggatcatccgctgctgcccgaatgtaacactttgacaatgcacaacgtgagttacgtgcgaggtcttccctgcagtgtgggatttacgctgattcaggaatgggttgttccctgggatatggttctaacgcgggaggagcttgtaatcctgaggaagtgtatgcacgtgtgcctgtgttgtgccaacattgatatcatgacgagcatgatgatccatggttacgagtcctgggctctccactgtcattgttccagtcccggttccctgcagtgtatagccggcgggcaggttttggccagctggtttaggatggtggtggatggcgccatgtttaatcagaggtttatatggtaccgggaggtggtgaattacaacatgccaaaagaggtaatgtttatgtccagcgtgtttatgaggggtcgccacttaatctacctgcgcttgtggtatgatggccacgtgggttctgtggtccccgccatgagctttggatacagcgccttgcactgtgggattttgaacaatattgtggtgctgtgctgcagttactgtgctgatttaagtgagatcagggtgcgctgctgtgcccggaggacaaggcgccttatgctgcgggcggtgcgaatcatcgctgaggagaccactgccatgttgtattcctgcaggacggagcggcggcggcagcagtttattcgcgcgctgctgcagcaccaccgccctatcctgatgcacgattatgactctacccccatgtaggcgtggacttctccttcgccgcccgttaagcaaccgcaagttggacagcagcctgtggctcagcagctggacagcgacatgaacttaagtgagctgcccggggagtttattaatatcactgatgagcgtttggctcgacaggaaaccgtgtggaatataacacctaagaatatgtctgttacccatgatatgatgctttttaaggccagccggggagaaaggactgtgtactctgtgtgttgggagggaggtggcaggttgaatactagggttctgtgagtttgattaaggtacggtgatctgtataagctatgtggtggtggggctatactactgaatgaaaaatgacttgaaattttctgcaattgaaaaataaacacgttgaaacataacacaaacgattctttattcttgggcaatgtatgaaaaagtgtaagaggatgtggcaaatatttcattaatgtagttgtggccagaccagtcccatgaaaatgacatagagtatgcacttggagttgtgtctcctgtttcctgtgtaccgtttagtgtaatggttagtgttacaggtttagttttgtctccgtttaagtaaacttgactgacaatgttacttttggcagttttaccgtgagattttggataagctgataggttagttaattaaggctgcgcgctcgctcgctcactgaggccgcccgggcaaagcccgggcgtcgggcgacctttggtcgcccggcctcagtgagcgagcgagcgcgcagagagggagtggccaactccatcactaggggttcctgcggccgcagctagcccattaccctggcacacaaaaaaccaacacactctgatcgatgcatctgagctctttattaggcctctcgagtcatcaccttggagactgtggagaggtgggcatcatttcaggaggagaaggcagagggctcagtcccttgtgctcatgctgctgtttgagcctgtcatactctgcctgcaggtttctgttctcttcctcaagatctgccaggattctttccagctctcccctttcctcagactcaaggctgatcaggatctgagcagggcttctaggctggctcagtggagagtcctggttcagggactgacagtagtgctggatcagcagatgctcatcatcaatgctctcattggggctgatgctatcattcaggtagctgccattgctgttttccatctctgccagtctggaggcatagtgctcaattctgctgtgggtgtcatcatgggacagctgtggacttgaggcaggggcagagtccactggccagaaattgatcagtgtcacaggggtttccatgttgtcaccctcaagcactgtctggacaggcaggtagcccattctggggtgcttagcaaagtatctcttggtcctgaacttgtttttcagcaccttggcaaagtctctaacatcttccccagaggttgttggggtgcagtattccaccatggggtagtgcattttgtggcccttggcaaccctgccactaaagaagcagctctggcagatatcatagttgaagtgcttcagggatctgtatctgaagccaatgatggggcactctttgcagatgttgcacttggcctggtgcttggcagtctcagcagcagccactctatgaagcacaggcagccagaccatgctctgaggctcaagtctcatccagtccaggaacagggcagcctcaatctcaggcttgttgttggcaaactgaaaacaggacctgactgatggctcaatattgctgcctccaaaggaagccacttctcccagctgtctagggatctgaatgctgtcatgcaggagcaggcccagccttctctggtcacaaaagcctgtgctggaggccacttgcttgaacaggtatctgtacttgtcctccaagtgggctttgcacagggagatgatgcctgtcttgaaggacaggactctgatcctgcctgttctgcctgtgtcatacacattcagcagccaattcaggcacatgtccacacacaggggcacattgaccagattgttgtgctcttgttccagcctatcatagatggtggtgaggcagttgatgatctggaggatgtccataggctggtcattctgcttcagattgtgctggtccagggcatcacaagctgcactcagggaaagcaggtccaggcacagagctttctggagccttctgagcttcatggcagtcctgtaggcactgaatctgacattgttgaggtctgccagactctggtacagctctgtcatcttggggtgatcccaacaggtggtctgtgtctcatggttgatgtagtagggcaccttgttaggagagatagctctctcccaggggccttgcacagaggtagacagaaagtgctggctggctggtccaaaatctctgtgggcctcatgcagctgcctgactctatcttccactgccacctggaggagcttccacctggtgttcaggtcctcaagggtgctcaggttgtaggggctcagctggattcccagtgtggtcagctgtctggccaggtcattcacatgggacacattttctttcagaggggcaatctctcccctcagggctttcactttttccagatggtcctgcaggctatcaatgagcaggtccccaactggctgccagctgcctttgatcacttcagcctgtctcagcttcaggtccagctcatctgtggcctcttgaagttcttgcagcctttccagtgtggggacttccagcatcagagagctgggcatttccagtttgctgatggctgtctctttggtgaccactggctgggtaaccagggtcacagtctgtgttggagaggctccaattgtggtcaggccaggggcaagatcaggttgctggctgatctgggctgtagacttttccagcttctgcaccaggttgtcccagcatctagcaaagttgtccagccaggcctcagttttctgggtcacagacttgttcttcagggtagacagcaggtcctgcttcaggctgtagagcttgcccatggactgctttttcttttccaggtcagccttcagcacagccagtttctgcagggagctgagcatctcattctgatccttgaagcctgtggtatggatcttgttgacagcatcctctttctcagagagccaggcagaaaacaggcactgttcctctgtcagtctctgccacttcagcagaatgtcctggagcagcacccatctatcctctgtccacctacagatgttggcccatctgtctcccagcaccttcagctgttcttccagagcagctgtggcatgatccccagaggactcatccacaaccaccaccatgtgtgtcaggctgttcactctgacttgctcttgctcaaggtcctcttgcagcaccttatgctgctgcacctgtcttttcagatcttccaggtctggtcccagaggttcctcttccatcttcctagtcctttcttctgtcttggtcagccagtcattcagttctttcagtttctgattctgcaggtccatgagcactctgtgcaggttgctctgcttttccatgctggccactctcagacactcccatctgctgttcagcaggttcatctgctcttgcacctctgtctcttcatcctcagacagcttgcctgtgccaatcagcttggagcccagctgcaggatatttcccactctgccctggtgggctgtcaggtccatcatgtagccctcatgggtgtgaaactggtccttgaccacttccacatcattgctgatttcaccctgagcctgcagtgtatcctcagcagacagcagccaggacagcacttcttccagggctgtctggtatctatccaggttcacttcagattccatcaggctgctgccaaagctcttgtcctcaggggcttccagatgctggcttggaaatgggcttcttgtggggtcagatgtggtcacataggcagcctgtgtgtaggcatagctcttgaacctaggcttggggctgcttgttctctcatatccctgggccagagacactgtgatctgctgagagtagtgcatctggtggtgcagctggaagtgttcctctttggtcactttaggaggtctgggcagcatctcaacctcttgaatggcctcaatggacacttgctggggcagcacctggaacaggctggtgatgtacatgaggatggatttcttgtcaggataggtggtgtccacatcctcagggtccagcagtttctcaattcccagctggtatctggcaatgttgaaggcatgttccagtctctgtgtggcagactgctggcacacaacagagttccagtcaaacaggtcaggtctgtggctgtggatcagggcattcagggccagtccatcactccaagaggtggtgaagttgatcacattcacttgagggtagtttctggtgctctgtctgacccagctcagcaggatcttctcagagttggtctgctgcaggccagccatgatgttcttcatcacattcttcacttgccagtgcaggatgatgttccagatcaggcccagggtcagcttgtggttgccatccacaatgtctgtgctgccaatattgaccaggtccacattgttgttctgcagcactctcagggccttgttcacattgttcagggcatgcactcttgtgctgcccttctctttaggcagcttctggcctgtcaggccttccagcagatccagcagccttctgccatcctgcaggtcactgaacaggttctcaatgtgctgcttgccaaacttgctgaactgggcattgacccatttggtgaaggttttcttctgcacatcttccctctcatagcaatcttccacctcttcccaccaaagcatggtggcgaattccgcttggcgcctcccgctcctccgggtagctcgtgggccgccgccggccccggagccttttatcgaggcgggcgggagcaccgcccggcccccaggaatgcggccccggccgagggcccgtcgccatatttgggtgtccgtgaggaaccgtcgccatatttgggtgtccaccattcctccgctctaaaaataactccccgctctaaaaataactcccccaacacctgctgcctgcccaccttcctcaccgctctaaaaataactccccaccattcctcacccgtcgccatatttgggtgtcgtgaggatggtgccgagggcggacggcctctagaggatccccattaccctgcatatgaggaacccctagtgatggagttggccactccctctctgcgcgctcgctcgctcactgaggccgggcgaccaaaggtcgcccgacgcccgggctttgcccgggcggcctcagtgagcgagcgagcgcgcagcctaattaaggccttaattaagcataaatccaacagcgtttgtataggctgtcgcccctcctgacgcggtaggaggaggggagggtgccctgcatgtctgccgctgctcttgctcttgccgctgctgaggaggggggcgcatctgccgcagcaccggatgcatctgggaaaagcaaaaaaggggctcgtccctgtttccggaggaatttgcaagcggggtcttgcatgacggggaggcaaacccccgttcgccgcagtccggccggtccgagactcgaaccgggggtcccgcgactcaacccttggaaaataaccctccggctacagggagcgagccacttaatgctttcgctttccagcctaaccgcttacgctgcgcgcggccagtggccaaaaaagctagcgcagcagccgccgcgcctggaaggaagccaaaaggagcactcccccgttgtctgacgtcgcacacctgggttcgacacgcgggcggtaaccgcatggatcacggcggacggccggatacggggctcgaaccccggtcgtccgccatgatacccttgcgaatttatccaccagaccacggaagagtgcccgcttacaggctctccttttgcacggtctagagcgtcaacgattgcgcgcgcctgaccggccagagcgtcccgaccatggagcactttttgccgctgcgcaacatctggaaccgcgtccgcgactttccgcgcgcctccaccaccgccgccggcatcacctggatgtccaggtacatctacggata

SEQ ID NO: 273 - DNA, 2853 bp, synthetic construct
  source 1..2853: mol_type = other DNA
tcagaagtcgaaggggttctgtctggcatcggaatgggccacgggcagagacacgttccggtactggtgcttggtggaccacttgaactcaggcacgaccattctaggcagctctgtgaagttctcgctccacaggctccgcaccatcaccagggcgttcagcaggtcaggggcgctgattttgaagtcgcagttaggtccgccgccctgggctctgctgtttctgtacacagggttgcagcactggaacacaataagagcagggtggtgcacgctggccagcacagacttgtcgctgatcaggtcggcgtcgagatcctcggcgttagacaaggcaaaaggggtcagcttgggcagctggcggcccaggaaaggggcgtggccgggcttgctattgcactcgcatctcagaggcatcagcaggtggccgtggccggtctgggcgttggggtacagggcctgcataaaggccttgatctgtttgaaggccacttgggccttggcgccttcggagaagaacatgccgcagcttttgccgctgaactggttggcggggcaggcggcgtcgtgcacacaacaccgggcgtcggtattgctgatctgcaccacgtttctgccccatctgttcttcacgatcttggccttgctgctctgctctttcagggccctctggccgttctcagaggtgacgtccatctcgatcacatgttccttgttgatcatgatgctgccgtgcagacacttcagctcgccctcgatttccgcgcatctgtgcagccacagggcacaaccggtaggctcgtggtgcttgtatgtcacctcagcaaaagattgcaggtaggcttgcaggaatctgcccatcatggtcacgaaggtcttgttggaggtaaaagtcagctgcagtcctctgtgttcctcgttcagccatgtcttgcacacggcggccagagcctcgacctgatctggcagcagcttgaaattagccttcaggtcgttgtccacgtgatacttatccatcagtgctctggcggcttccatgcccttctcccaggcggaaacgatgggcacgctcagggggttcatcacggtgatctcgctttcagcttctgaaggttcctcctcttcctcctgtgttctcatgccccgagccacggggtcgtcctcattcagtctccgcacggttctttttcctccctttccgtgcttaatcagtacaggaggattagagaagcccaccatctggagggcgacgtcctccctttcttcttcgctatccacgatcacttctgggctggggggccgttcaggctttgggctaggccgtttttttttcttcttaggggcgatagccagatcagcggcgcttgtagagggccgaggactaggggttctaggcacgagggcgtcctggctgctgtcctcctcatcctcgctctcgatccgtctccgcattctcttcttagggggggcccgcggagggggagggctagggctaggggacgacacatcttccatggttggaggtctgcgagcagcgcctctgcctctctctggtgttgtctcgcgctgttcttcctctctagaggccatttccttctcctataggcagaaaaagatcgttgaaactcactccggggctgtggacgtcggcttaccttcgcaaatttgtacctgaggactaccacgcccacgagattaggttctacgaagaccaatcccgcccgcctaatgcggagcttaccgcctgcgtcattacccagggccacattcttggccaattgcaagccatcaacaaagcccgccaagagtttctgctacgaaagggacggggggtttacttggacccccagtccggcgaggagctcaacccaatccccccgccgccgcagccctatcagcagcagccgcgggcccttgcttcccaggatggcacccaaaaagaagctgcagctgccgccgccacccacggacgaggaggaatactgggacagtcaggcagaggaggttttggacgaggaggaggaggacatgatggaagactgggagagcctagacgaggaagcttccgaggtcgaagaggtgtcagacgaaacaccgtcaccctcggtcgcattcccctcgccggcgccccagaaatcggcaaccggttccagcatggctacaacctccgctcctcaggcgccgccggcactgcccgttcgccgacccaaccgtagatgggacaccactggaaccagggccggtaagtccaagcagccgccgccgttagcccaagagcaacaacagcgccaaggctaccgctcatggcgcgggcacaagaacgccatagttgcttgcttgcaagactgtgggggcaacatctccttcgcccgccgctttcttctctaccatcacggcgtggccttcccccgtaacatcctgcattactaccgtcatctctacagcccatactgcaccggcggcagcggcagcaacagcagcggccacacagaagcaaaggcgaccggatagcaagactctgacaaagcccaagaaatccacagcggcggcagcagcaggaggaggagcgctgcgtctggcgcccaacgaacccgtatcgacccgcgagcttagaaacaggatttttcccactctgtatgctatatttcaacagagcaggggccaagaacaagagctgaaaataaaaaacaggtctctgcgatccctcacccgcagctgcctgtatcacaaaagcgaagatcagcttcggcgcacgctggaagacgcggaggctctcttcagtaaatactgcgcgctgactcttaaggactagtttcgcgccctttctcaaatttaagcgcgaaaactacgtca

SEQ ID NO: 274 - DNA, 2927 bp, synthetic construct
  source 1..2927: mol_type = other DNA
aataaaggcaaatgcttttatttgtacactctcgggtgattatttacccccacccttgccgtctgcgccgtttatcagaagtcgaaggggttctgtctggcatcggaatgggccacgggcagagacacgttccggtactggtgcttggtggaccacttgaactcaggcacgaccattctaggcagctctgtgaagttctcgctccacaggctccgcaccatcaccagggcgttcagcaggtcaggggcgctgattttgaagtcgcagttaggtccgccgccctgggctctgctgtttctgtacacagggttgcagcactggaacacaataagagcagggtggtgcacgctggccagcacagacttgtcgctgatcaggtcggcgtcgagatcctcggcgttagacaaggcaaaaggggtcagcttgggcagctggcggcccaggaaaggggcgtggccgggcttgctattgcactcgcatctcagaggcatcagcaggtggccgtggccggtctgggcgttggggtacagggcctgcataaaggccttgatctgtttgaaggccacttgggccttggcgccttcggagaagaacatgccgcagcttttgccgctgaactggttggcggggcaggcggcgtcgtgcacacaacaccgggcgtcggtattgctgatctgcaccacgtttctgccccatctgttcttcacgatcttggccttgctgctctgctctttcagggccctctggccgttctcagaggtgacgtccatctcgatcacatgttccttgttgatcatgatgctgccgtgcagacacttcagctcgccctcgatttccgcgcatctgtgcagccacagggcacaaccggtaggctcgtggtgcttgtatgtcacctcagcaaaagattgcaggtaggcttgcaggaatctgcccatcatggtcacgaaggtcttgttggaggtaaaagtcagctgcagtcctctgtgttcctcgttcagccatgtcttgcacacggcggccagagcctcgacctgatctggcagcagcttgaaattagccttcaggtcgttgtccacgtgatacttatccatcagtgctctggcggcttccatgcccttctcccaggcggaaacgatgggcacgctcagggggttcatcacggtgatctcgctttcagcttctgaaggttcctcctcttcctcctgtgttctcatgccccgagccacggggtcgtcctcattcagtctccgcacggttctttttcctccctttccgtgcttaatcagtacaggaggattagagaagcccaccatctggagggcgacgtcctccctttcttcttcgctatccacgatcacttctgggctggggggccgttcaggctttgggctaggccgtttttttttcttcttaggggcgatagccagatcagcggcgcttgtagagggccgaggactaggggttctaggcacgagggcgtcctggctgctgtcctcctcatcctcgctctcgatccgtctccgcattctcttcttagggggggcccgcggagggggagggctagggctaggggacgacacatcttccatggttggaggtctgcgagcagcgcctctgcctctctctggtgttgtctcgcgctgttcttcctctctagaggccatttccttctcctataggcagaaaaagatcgttgaaactcactccggggctgtggacgtcggcttaccttcgcaaatttgtacctgaggactaccacgcccacgagattaggttctacgaagaccaatcccgcccgcctaatgcggagcttaccgcctgcgtcattacccagggccacattcttggccaattgcaagccatcaacaaagcccgccaagagtttctgctacgaaagggacggggggtttacttggacccccagtccggcgaggagctcaacccaatccccccgccgccgcagccctatcagcagcagccgcgggcccttgcttcccaggatggcacccaaaaagaagctgcagctgccgccgccacccacggacgaggaggaatactgggacagtcaggcagaggaggttttggacgaggaggaggaggacatgatggaagactgggagagcctagacgaggaagcttccgaggtcgaagaggtgtcagacgaaacaccgtcaccctcggtcgcattcccctcgccggcgccccagaaatcggcaaccggttccagcatggctacaacctccgctcctcaggcgccgccggcactgcccgttcgccgacccaaccgtagatgggacaccactggaaccagggccggtaagtccaagcagccgccgccgttagcccaagagcaacaacagcgccaaggctaccgctcatggcgcgggcacaagaacgccatagttgcttgcttgcaagactgtgggggcaacatctccttcgcccgccgctttcttctctaccatcacggcgtggccttcccccgtaacatcctgcattactaccgtcatctctacagcccatactgcaccggcggcagcggcagcaacagcagcggccacacagaagcaaaggcgaccggatagcaagactctgacaaagcccaagaaatccacagcggcggcagcagcaggaggaggagcgctgcgtctggcgcccaacgaacccgtatcgacccgcgagcttagaaacaggatttttcccactctgtatgctatatttcaacagagcaggggccaagaacaagagctgaaaataaaaaacaggtctctgcgatccctcacccgcagctgcctgtatcacaaaagcgaagatcagcttcggcgcacgctggaagacgcggaggctctcttcagtaaatactgcgcgctgactcttaaggactagtttcgcgccctttctcaaatttaagcgcgaaaactacgtca

SEQ ID NO: 275 - DNA, 2853 bp, synthetic construct; identical to SEQ ID NO: 22
  source 1..2853: mol_type = other DNA

SEQ ID NO: 276 - DNA, 2924 bp, synthetic construct
  source 1..2924: mol_type = other DNA
aataaaggcaaatgcttttatttgtacactctcgggtgattatttacccccacccttgccgtctgcgccgtttaaaaatcaaaggggttctgccgcgcatcgctatgcgccactggcagggacacgttgcgatactggtgtttagtgctccacttaaactcaggcacaaccatccgcggcagctcggtgaagttttcactccacaggctgcgcaccatcaccaacgcgtttagcaggtcgggcgccgatatcttgaagtcgcagttggggcctccgccctgcgcgcgcgagttgcgatacacagggttgcagcactggaacactatcagcgccgggtggtgcacgctggccagcacgctcttgtcggagatcagatccgcgtccaggtcctccgcgttgctcagggcgaacggagtcaactttggtagctgccttcccaaaaagggcgcgtgcccaggctttgagttgcactcgcaccgtagtggcatcaaaaggtgaccgtgcccggtctgggcgttaggatacagcgcctgcataaaagccttgatctgcttaaaagccacctgagcctttgcgccttcagagaagaacatgccgcaagacttgccggaaaactgattggccggacaggccgcgtcgtgcacgcagcaccttgcgtcggtgttggagatctgcaccacatttcggccccaccggttcttcacgatcttggccttgctagactgctccttcagcgcgcgctgcccgttttcgctcgtcacatccatttcaatcacgtgctccttatttatcataatgcttccgtgtagacacttaagctcgccttcgatctcagcgcagcggtgcagccacaacgcgcagcccgtgggctcgtgatgcttgtaggtcacctctgcaaacgactgcaggtacgcctgcaggaatcgccccatcatcgtcacaaaggtcttgttgctggtgaaggtcagctgcaacccgcggtgctcctcgttcagccaggtcttgcatacggccgccagagcttccacttggtcaggcagtagtttgaagttcgcctttagatcgttatccacgtggtacttgtccatcagcgcgcgcgcagcctccatgcccttctcccacgcagacacgatcggcacactcagcgggttcatcaccgtaatttcactttccgcttcgctgggctcttcctcttcctcttgcgtccgcataccacgcgccactgggtcgtcttcattcagccgccgcactgtgcgcttacctcctttgccatgcttgattagcaccggtgggttgctgaaacccaccatttgtagcgccacatcttctctttcttcctcgctgtccacgattacctctggtgatggcgggcgctcgggcttgggagaagggcgcttctttttcttcttgggcgcaatggccaaatccgccgccgaggtcgatggccgcgggctgggtgtgcgcggcaccagcgcgtcttgtgatgagtcttcctcgtcctcggactcgatacgccgcctcatccgcttttttgggggcgcccggggaggcggcggcgacggggacggggacgacacgtcctccatggttgggggacgtcgcgccgcaccgcgtccgcgctcgggggtggtttcgcgctgctcctcttcccgactggccatttccttctcctataggcagaaaaagatcgttgaaactcactccggggctgtggacgtcggcttaccttcgcaaatttgtacctgaggactaccacgcccacgagattaggttctacgaagaccaatcccgcccgcctaatgcggagcttaccgcctgcgtcattacccagggccacattcttggccaattgcaagccatcaacaaagcccgccaagagtttctgctacgaaagggacggggggtttacttggacccccagtccggcgaggagctcaacccaatccccccgccgccgcagccctatcagcagcagccgcgggcccttgcttcccaggatggcacccaaaaagaagctgcagctgccgccgccacccacggacgaggaggaatactgggacagtcaggcagaggaggttttggacgaggaggaggaggacatgatggaagactgggagagcctagacgaggaagcttccgaggtcgaagaggtgtcagacgaaacaccgtcaccctcggtcgcattcccctcgccggcgccccagaaatcggcaaccggttccagcatggctacaacctccgctcctcaggcgccgccggcactgcccgttcgccgacccaaccgtagatgggacaccactggaaccagggccggtaagtccaagcagccgccgccgttagcccaagagcaacaacagcgccaaggctaccgctcatggcgcgggcacaagaacgccatagttgcttgcttgcaagactgtgggggcaacatctccttcgcccgccgctttcttctctaccatcacggcgtggccttcccccgtaacatcctgcattactaccgtcatctctacagcccatactgcaccggcggcagcggcagcaacagcagcggccacacagaagcaaaggcgaccggatagcaagactctgacaaagcccaagaaatccacagcggcggcagcagcaggaggaggagcgctgcgtctggcgcccaacgaacccgtatcgacccgcgagcttagaaacaggatttttcccactctgtatgctatatttcaacagagcaggggccaagaacaagagctgaaaataaaaaacaggtctctgcgatccctcacccgcagctgcctgtatcacaaaagcgaagatcagcttcggcgcacgctggaagacgcggaggctctcttcagtaaatactgcgcgctgactcttaaggactagtttcgcgccctttctcaaatttaagcgcgaaaactacgtca

SEQ ID NO: 277 - DNA, 4371 bp, synthetic construct; identical to SEQ ID NO: 111
  source 1..4371: mol_type = other DNA

SEQ ID NO: 278 - DNA, 4371 bp, synthetic construct; identical to SEQ ID NO: 111
  source 1..4371: mol_type = other DNA

SEQ ID NO: 279 - DNA, 4371 bp, synthetic construct; identical to SEQ ID NO: 116
  source 1..4371: mol_type = other DNA

SEQ ID NO: 280 - DNA, 4092 bp, synthetic construct
  source 1..4092: mol_type = other DNA
ttaaaaatcaaaggggttctgccgcgcatcgctatgcgccactggcagggacacgttgcgatactggtgtttagtgctccacttaaactcaggcacaaccatccgcggcagctcggtgaagttttcactccacaggctgcgcaccatcaccaacgcgtttagcaggtcgggcgccgatatcttgaagtcgcagttggggcctccgccctgcgcgcgcgagttgcgatacacagggttgcagcactggaacactatcagcgccgggtggtgcacgctggccagcacgctcttgtcggagatcagatccgcgtccaggtcctccgcgttgctcagggcgaacggagtcaactttggtagctgccttcccaaaaagggcgcgtgcccaggctttgagttgcactcgcaccgtagtggcatcaaaaggtgaccgtgcccggtctgggcgttaggatacagcgcctgcataaaagccttgatctgcttaaaagccacctgagcctttgcgccttcagagaagaacatgccgcaagacttgccggaaaactgattggccggacaggccgcgtcgtgcacgcagcaccttgcgtcggtgttggagatctgcaccacatttcggccccaccggttcttcacgatcttggccttgctagactgctccttcagcgcgcgctgcccgttttcgctcgtcacatccatttcaatcacgtgctccttatttatcataatgcttccgtgtagacacttaagctcgccttcgatctcagcgcagcggtgcagccacaacgcgcagcccgtgggctcgtgatgcttgtaggtcacctctgcaaacgactgcaggtacgcctgcaggaatcgccccatcatcgtcacaaaggtcttgttgctggtgaaggtcagctgcaacccgcggtgctcctcgttcagccaggtcttgcatacggccgccagagcttccacttggtcaggcagtagtttgaagttcgcctttagatcgttatccacgtggtacttgtccatcagcgcgcgcgcagcctccatgcccttctcccacgcagacacgatcggcacactcagcgggttcatcaccgtaatttcactttccgcttcgctgggctcttcctcttcctcttgcgtccgcataccacgcgccactgggtcgtcttcattcagccgccgcactgtgcgcttacctcctttgccatgcttgattagcaccggtgggttgctgaaacccaccatttgtagcgccacatcttctctttcttcctcgctgtccacgattacctctggtgatggcgggcgctcgggcttgggagaagggcgcttctttttcttcttgggcgcaatggccaaatccgccgccgaggtcgatggccgcgggctgggtgtgcgcggcaccagcgcgtcttgtgatgagtcttcctcgtcctcggactcgatacgccgcctcatccgcttttttgggggcgcccggggaggcggcggcgacggggacggggacgacacgtcctccatggttgggggacgtcgcgccgcaccgcgtccgcgctcgggggtggtttcgcgctgctcctcttcccgactggccatttccttctcctataggcagaaaaagatcgttgaaactcactccggggctgtggacgtcggcttaccttcgcaaatttgtacctgaggactaccacgcccacgagattaggttctacgaagaccaatcccgcccgcctaatgcggagcttaccgcctgcgtcattacccagggccacattcttggccaattgcaagccatcaacaaagcccgccaagagtttctgctacgaaagggacggggggtttacttggacccccagtccggcgaggagctcaacccaatccccccgccgccgcagccctatcagcagcagccgcgggcccttgcttcccaggatggcacccaaaaagaagctgcagctgccgccgccacccacggacgaggaggaatactgggacagtcaggcagaggaggttttggacgaggaggaggaggacatgatggaagactgggagagcctagacgaggaagcttccgaggtcgaagaggtgtcagacgaaacaccgtcaccctcggtcgcattcccctcgccggcgccccagaaatcggcaaccggttccagcatggctacaacctccgctcctcaggcgccgccggcactgcccgttcgccgacccaaccgtagatgggacaccactggaaccagggccggtaagtccaagcagccgccgccgttagcccaagagcaacaacagcgccaaggctaccgctcatggcgcgggcacaagaacgccatagttgcttgcttgcaagactgtgggggcaacatctccttcgcccgccgctttcttctctaccatcacggcgtggccttcccccgtaacatcctgcattactaccgtcatctctacagcccatactgcaccggcggcagcggcagcaacagcagcggccacacagaagcaaaggcgaccggatagcaagactctgacaaagcccaagaaatccacagcggcggcagcagcaggaggaggagcgctgcgtctggcgcccaacgaacccgtatcgacccgcgagcttagaaacaggatttttcccactctgtatgctatatttcaacagagcaggggccaagaacaagagctgaaaataaaaaacaggtctctgcgatccctcacccgcagctgcctgtatcacaaaagcgaagatcagcttcggcgcacgctggaagacgcggaggctctcttcagtaaatactgcgcgctgactcttaaggactagtttcgcgccctttctcaaatttaagcgcgaaaactacgtcatctccagcggccacacccggcgccagcacctgttgtcagcgccattttttagggcggagtaacttgtatgtgttgggaattgtagttttcttaaaatgggaagtgacgtaacgtgggaaaacggaagtgacgatttgaggaagttgtgggttttttggctttcgtttctgggcgtaggttcgcgtgcggttttctgggtgttttttgtggactttaaccgttacgtcattttttagtcctatatatactcgctctgcacttggcccttttttacactgtgactgattgagctggtgccgtgtcgagtggtgtttttttaataggttttcttttttactggtaaggctgactgttatgactacgtccggcgttccatttggcatgacactacgaccaacacgatctcggttgtctcggcgcactccgtacagtagggatcgtctacctccttttgagacagaaacccgcgctaccatactggaggatcatccgctgctgcccgaatgtaacactttgacaatgcacaacgtgagttacgtgcgaggtcttccctgcagtgtgggatttacgctgattcaggaatgggttgttccctgggatatggttctaacgcgggaggagcttgtaatcctgaggaagtgtatgcacgtgtgcctgtgttgtgccaacattgatatcatgacgagcatgatgatccatggttacgagtcctgggctctccactgtcattgttccagtcccggttccctgcagtgtatagccggcgggcaggttttggccagctggtttaggatggtggtggatggcgccatgtttaatcagaggtttatatggtaccgggaggtggtgaattacaacatgccaaaagaggtaatgtttatgtccagcgtgtttatgaggggtcgccacttaatctacctgcgcttgtggtatgatggccacgtgggttctgtggtccccgccatgagctttggatacagcgccttgcactgtgggattttgaacaatattgtggtgctgtgctgcagttactgtgctgatttaagtgagatcagggtgcgctgctgtgcccggaggacaaggcgccttatgctgcgggcggtgcgaatcatcgctgaggagaccactgccatgttgtattcctgcaggacggagcggcggcggcagcagtttattcgcgcgctgctgcagcaccaccgccctatcctgatgcacgattatgactctacccccatgtag

SEQ ID NO: 281 - DNA, 4092 bp, synthetic construct; identical to SEQ ID NO: 280
  source 1..4092: mol_type = other DNA

SEQ ID NO: 282 - DNA, 4092 bp, synthetic construct
  source 1..4092: mol_type = other DNA
tcagaagtcgaaggggttctgtctggcatcggaatgggccacgggcagagacacgttccggtactggtgcttggtggaccacttgaactcaggcacgaccattctaggcagctctgtgaagttctcgctccacaggctccgcaccatcaccagggcgttcagcaggtcaggggcgctgattttgaagtcgcagttaggtccgccgccctgggctctgctgtttctgtacacagggttgcagcactggaacacaataagagcagggtggtgcacgctggccagcacagacttgtcgctgatcaggtcggcgtcgagatcctcggcgttagacaaggcaaaaggggtcagcttgggcagctggcggcccaggaaaggggcgtggccgggcttgctattgcactcgcatctcagaggcatcagcaggtggccgtggccggtctgggcgttggggtacagggcctgcataaaggccttgatctgtttgaaggccacttgggccttggcgccttcggagaagaacatgccgcagcttttgccgctgaactggttggcggggcaggcggcgtcgtgcacacaacaccgggcgtcggtattgctgatctgcaccacgtttctgccccatctgttcttcacgatcttggccttgctgctctgctctttcagggccctctggccgttctcagaggtgacgtccatctcgatcacatgttccttgttgatcatgatgctgccgtgcagacacttcagctcgccctcgatttccgcgcatctgtgcagccacagggcacaaccggtaggctcgtggtgcttgtatgtcacctcagcaaaagattgcaggtaggcttgcaggaatctgcccatcatggtcacgaaggtcttgttggaggtaaaagtcagctgcagtcctctgtgttcctcgttcagccatgtcttgcacacggcggccagagcctcgacctgatctggcagcagcttgaaattagccttcaggtcgttgtccacgtgatacttatccatcagtgctctggcggcttccatgcccttctcccaggcggaaacgatgggcacgctcagggggttcatcacggtgatctcgctttcagcttctgaaggttcctcctcttcctcctgtgttctcatgccccgagccacggggtcgtcctcattcagtctccgcacggttctttttcctccctttccgtgcttaatcagtacaggaggattagagaagcccaccatctggagggcgacgtcctccctttcttcttcgctatccacgatcacttctgggctggggggccgttcaggctttgggctaggccgtttttttttcttcttaggggcgatagccagatcagcggcgcttgtagagggccgaggactaggggttctaggcacgagggcgtcctggctgctgtcctcctcatcctcgctctcgatccgtctccgcattctcttcttagggggggcccgcggagggggagggctagggctaggggacgacacatcttccatggttggaggtctgcgagcagcgcctctgcctctctctggtgttgtctcgcgctgttcttcctctctagaggccatttccttctcctataggcagaaaaagatcgttgaaactcactccggggctgtggacgtcggcttaccttcgcaaatttgtacctgaggactaccacgcccacgagattaggttctacgaagaccaatcccgcccgcctaatgcggagcttaccgcctgcgtcattacccagggccacattcttggccaattgcaagccatcaacaaagcccgccaagagtttctgctacgaaagggacggggggtttacttggacccccagtccggcgaggagctcaacccaatccccccgccgccgcagccctatcagcagcagccgcgggcccttgcttcccaggatggcacccaaaaagaagctgcagctgccgccgccacccacggacgaggaggaatactgggacagtcaggcagaggaggttttggacgaggaggaggaggacatgatggaagactgggagagcctagacgaggaagcttccgaggtcgaagaggtgtcagacgaaacaccgtcaccctcggtcgcattcccctcgccggcgccccagaaatcggcaaccggttccagcatggctacaacctccgctcctcaggcgccgccggcactgcccgttcgccgacccaaccgtagatgggacaccactggaaccagggccggtaagtccaagcagccgccgccgttagcccaagagcaacaacagcgccaaggctaccgctcatggcgcgggcacaagaacgccatagttgcttgcttgcaagactgtgggggcaacatctccttcgcccgccgctttcttctctaccatcacggcgtggccttcccccgtaacatcctgcattactaccgtcatctctacagcccatactgcaccggcggcagcggcagcaacagcagcggccacacagaagcaaaggcgaccggatagcaagactctgacaaagcccaagaaatccacagcggcggcagcagcaggaggaggagcgctgcgtctggcgcccaacgaacccgtatcgacccgcgagcttagaaacaggatttttcccactctgtatgctatatttcaacagagcaggggccaagaacaagagctgaaaataaaaaacaggtctctgcgatccctcacccgcagctgcctgtatcacaaaagcgaagatcagcttcggcgcacgctggaagacgcggaggctctcttcagtaaatactgcgcgctgactcttaaggactagtttcgcgccctttctcaaatttaagcgcgaaaactacgtcatctccagcggccacacccggcgccagcacctgttgtcagcgccattttttagggcggagtaacttgtatgtgttgggaattgtagttttcttaaaatgggaagtgacgtaacgtgggaaaacggaagtgacgatttgaggaagttgtgggttttttggctttcgtttctgggcgtaggttcgcgtgcggttttctgggtgttttttgtggactttaaccgttacgtcattttttagtcctatatatactcgctctgcacttggcccttttttacactgtgactgattgagctggtgccgtgtcgagtggtgtttttttaataggttttcttttttactggtaaggctgactgttatgactacgtccggcgttccatttggcatgacactacgaccaacacgatctcggttgtctcggcgcactccgtacagtagggatcgtctacctccttttgagacagaaacccgcgctaccatactggaggatcatccgctgctgcccgaatgtaacactttgacaatgcacaacgtgagttacgtgcgaggtcttccctgcagtgtgggatttacgctgattcaggaatgggttgttccctgggatatggttctaacgcgggaggagcttgtaatcctgaggaagtgtatgcacgtgtgcctgtgttgtgccaacattgatatcatgacgagcatgatgatccatggttacgagtcctgggctctccactgtcattgttccagtcccggttccctgcagtgtatagccggcgggcaggttttggccagctggtttaggatggtggtggatggcgccatgtttaatcagaggtttatatggtaccgggaggtggtgaattacaacatgccaaaagaggtaatgtttatgtccagcgtgtttatgaggggtcgccacttaatctacctgcgcttgtggtatgatggccacgtgggttctgtggtccccgccatgagctttggatacagcgccttgcactgtgggattttgaacaatattgtggtgctgtgctgcagttactgtgctgatttaagtgagatcagggtgcgctgctgtgcccggaggacaaggcgccttatgctgcgggcggtgcgaatcatcgctgaggagaccactgccatgttgtattcctgcaggacggagcggcggcggcagcagtttattcgcgcgctgctgcagcaccaccgccctatcctgatgcacgattatgactctacccccatgtag

SEQ ID NO: 283 - DNA, 5505 bp, synthetic construct; identical to SEQ ID NO: 108
  source 1..5505: mol_type = other DNA